(19) United States
(12) Patent Application Publication
(10) Pub. No.: US 2025/0368990 A1
(43) Pub. Date: Dec. 4, 2025

(54) TREATMENT OF MS4A4E RELATED DISEASES AND DISORDERS

(71) Applicant: EMPIRICO INC., San Diego, CA (US)

(72) Inventors: Omri GOTTESMAN, San Diego, CA (US); Shannon BRUSE, San Diego, CA (US); Eric BUSS, Chicago, IL (US); Brian CAJES, San Diego, CA (US); David JAKUBOSKY, San Diego, CA (US); Gregory MCINNES, San Diego, CA (US); John VEKICH, San Diego, CA (US); David ROZEMA, Cross Plains (CA)

(21) Appl. No.: 18/873,703

(22) PCT Filed: Jun. 15, 2023
(86) PCT No.: PCT/US2023/068512

§ 371 Date: Dec. 10, 2024

Related U.S. Application Data
(60) Provisional application No. 63/353,373, filed on Jun. 17, 2022.
(60) Provisional application No. 63/433,323, filed on Dec. 16, 2022.

(51) Int. Cl. C12N 15/113; A61P 1/16

(52) U.S. Cl. CPC C12N 15/113; A61P 1/16; C12N 2310/11; C12N 2310/14; C12N 2310/315; C12N 2310/321; C12N 2310/322; C12N 2310/351

(57) ABSTRACT

Disclosed herein are MS4A4E inhibitors such as oligonucleotides that target MS4A4E. The oligonucleotide may include a small interfering RNA (siRNA) or an antisense oligonucleotide (ASO). Also provided herein are methods of treating conditions associated with MS4A4E mutations that include providing an MS4A4E inhibitor to a subject.

### CROSS-REFERENCE

[0001] This application claims the benefit of U.S. Provisional Application No. 63/353,373, filed Jun. 17, 2022, and U.S. Provisional Application No. 63/433,323, filed Dec. 16, 2022, which applications are incorporated herein by reference.

### INCORPORATION BY REFERENCE OF SEQUENCE LISTING

[0002] The present application is being filed along with a Sequence Listing in electronic format. The Sequence Listing is provided as a file entitled 54462-727_601_SL, created Jun. 9, 2023, which is 6,399,433 bytes in size. The information in the electronic format of the Sequence Listing is incorporated by reference in its entirety.

### BACKGROUND OF THE INVENTION

[0003] Liver disorders such as fatty liver disorders are becoming increasingly abundant, and may affect a wide variety of persons. Improved therapeutics are needed for treating liver disorders.

### SUMMARY OF THE INVENTION

[0004] Disclosed herein, in some embodiments, are compositions comprising an MS4A4E inhibitor. In some embodiments, the MS4A4E inhibitor comprises an oligonucleotide. In some embodiments, the oligonucleotide targets MS4A4E. Disclosed herein, in some embodiments, are compositions comprising an oligonucleotide that targets MS4A4E. Disclosed herein, in some embodiments, are compositions comprising an MS4A4E inhibitor that when administered to a subject in an effective amount decreases MS4A4E or MS4A4E. Disclosed herein, in some embodiments, are compositions comprising an MS4A4E inhibitor that when administered to a subject in an effective amount decreases a liver disease measurement in the subject. In some embodiments, the liver disease measurement comprises a liver fat percentage measurement, a liver fibrosis score, a nonalcoholic fatty liver disease (NAFLD) activity score, a blood alanine aminotransferase (ALT) measurement, a blood aspartate aminotransferase (AST) measurement, or a blood gamma-glutamyl transferase (GGT) measurement. In some embodiments, the liver disease measurement is decreased by about 10% or more, as compared to prior to administration. Disclosed herein, in some embodiments, are compositions comprising an MS4A4E inhibitor that when administered to a subject in an effective amount decreases a metabolic disorder measurement in the subject, or increases a beneficial metabolic parameter measurement in the subject. In some embodiments, the beneficial metabolic parameter measurement comprises a blood high-density lipoprotein (HDL) measurement. In some embodiments, the metabolic disorder measurement comprises a blood triglyceride measurement, a blood hemoglobin A1C measurement, a body mass index (BMI), a body weight, a waist circumference, a body fat percentage, a blood glucose measurement, a glucose tolerance measurement, an insulin sensitivity measurement, or a non-HDL cholesterol measurement. In some embodiments, the metabolic disorder measurement is decreased by about 10% or more, as compared to prior to administration. In some embodiments, the beneficial metabolic parameter measurement is increased by about 10% or more, as compared to prior to administration. Disclosed herein, in some embodiments, are compositions comprising an MS4A4E inhibitor that when administered to a subject in an effective amount decreases a liver fat percentage in the subject. In some embodiments, the liver fat percentage is decreased by about 10% or more, as compared to prior to administration. Disclosed herein, in some embodiments, are compositions comprising an MS4A4E inhibitor that when administered to a subject in an effective amount decreases a liver fibrosis score in the subject. In some embodiments, the liver fibrosis score is decreased by about 10% or more, as compared to prior to administration. Disclosed herein, in some embodiments, are compositions comprising an MS4A4E inhibitor that when administered to a subject in an effective amount decreases a NAFLD activity score in the subject. In some embodiments, the NAFLD activity score is decreased by about 10% or more, as compared to prior to administration. Disclosed herein, in some embodiments, are compositions comprising an MS4A4E inhibitor that when administered to a subject in an effective amount decreases a blood ALT measurement in the subject. In some embodiments, the blood ALT measurement is decreased by about 10% or more, as compared to prior to administration. Disclosed herein, in some embodiments, are compositions comprising an MS4A4E inhibitor that when administered to a subject in an effective amount decreases a blood GGT measurement in the subject. In some embodiments, the blood GGT measurement is decreased by about 10% or more, as compared to prior to administration. Disclosed herein, in some embodiments, are compositions comprising an MS4A4E inhibitor that when administered to a subject in an effective amount decreases a blood AST measurement in the subject. In some embodiments, the blood AST measurement is decreased by about 10% or more, as compared to prior to administration. Disclosed herein, in some embodiments, are compositions comprising an MS4A4E inhibitor that when administered to a subject in an effective amount decreases a blood triglyceride measurement in the subject. In some embodiments, the blood triglyceride measurement is decreased by about 10% or more, as compared to prior to administration. Disclosed herein, in some embodiments, are compositions comprising an MS4A4E inhibitor that when administered to a subject in an effective amount increases an HDL cholesterol measurement in the subject. In some embodiments, the HDL cholesterol measurement is increased by about 10% or more, as compared to prior to administration. Disclosed herein, in some embodiments, are compositions comprising an MS4A4E inhibitor that when administered to a subject in an effective amount increases a blood HDL measurement in the subject. In some embodiments, the blood HDL measurement is increased by about 10% or more, as compared to prior to administration. Disclosed herein, in some embodiments, are compositions comprising an MS4A4E inhibitor that when administered to a subject in an effective amount decreases a blood hemoglobin A1C measurement in the subject. In some embodiments, the blood hemoglobin A1C measurement is decreased by about 10% or more, as compared to prior to administration. Disclosed herein, in some embodiments, are compositions comprising an MS4A4E inhibitor that when administered to a subject in an effective amount decreases the subject's body mass index (BMI). In some embodiments, the subject's BMI is decreased by about 10% or more, as compared to prior to administration. In some embodiments, the oligonucleotide comprises a modified internucleoside linkage. In some embodiments, the modified internucleoside linkage comprises alkylphosphonate, phosphorothioate, methylphosphonate, phosphorodithioate, alkylphosphonothioate, phosphoramidate, carbamate, carbonate, phosphate triester, acetamidate, or carboxymethyl ester, or a combination thereof. In some embodiments, the modified internucleoside linkage comprises one or more phosphorothioate linkages. In some embodiments, the oligonucleotide comprises 1, 2, 3, 4, 5, 6, 7, 8, 9, 10, 11, 12, 13, 14, 15, 16, 17, 18, 19, or 20 modified internucleoside linkages. In some embodiments, the oligonucleotide comprises 2 or more modified internucleoside linkages, 3 or more modified internucleoside linkages, 4 or more modified internucleoside linkages, 5 or more modified internucleoside linkages, 6 or more modified internucleoside linkages, 7 or more modified internucleoside linkages, 8 or more modified internucleoside linkages, 9 or more modified internucleoside linkages, 10 or more modified internucleoside linkages, 11 or more modified internucleoside linkages, 12 or more modified internucleoside linkages, 13 or more modified internucleoside linkages, 14 or more modified internucleoside linkages, 15 or more modified internucleoside linkages, 16 or more modified internucleoside linkages, 17 or more modified internucleoside linkages, 18 or more modified internucleoside linkages, 19 or more modified internucleoside linkages, or 20 or more modified internucleoside linkages. In some embodiments, the oligonucleotide comprises a modified nucleoside. In some embodiments, the modified nucleoside comprises a locked nucleic acid (LNA), hexitol nucleic acid (HLA), cyclohexene nucleic acid (CeNA), 2′-methoxyethyl, 2′-O-alkyl, 2′-O-allyl, 2′-O-allyl, 2′-fluoro, or 2′-deoxy, or a combination thereof. In some embodiments, the modified nucleoside comprises a LNA. In some embodiments, the modified nucleoside comprises a 2′,4′ constrained ethyl nucleic acid. In some embodiments, the modified nucleoside comprises a 2′-O-methyl nucleoside, 2′-deoxyfluoro nucleoside, 2′-O—N-methylacetamido (2′-O-NMA) nucleoside, a 2′-O-dimethylaminoethoxyethyl (2′-O-DMAEOE) nucleoside, 2′-O-aminopropyl (2′-O-AP) nucleoside, or 2′-ara-F, or a combination thereof. In some embodiments, the modified nucleoside comprises one or more 2′fluoro modified nucleosides. In some embodiments, the modified nucleoside comprises a 2′ O-alkyl modified nucleoside. In some embodiments, the oligonucleotide comprises 1, 2, 3, 4, 5, 6, 7, 8, 9, 10, 11, 12, 13, 14, 15, 16, 17, 18, 19, 20, or 21 modified nucleosides. In some embodiments, the oligonucleotide comprises 2 or more modified nucleosides, 3 or more modified nucleosides, 4 or more modified nucleosides, 5 or more modified nucleosides, 6 or more modified nucleosides, 7 or more modified nucleosides, 8 or more modified nucleosides, 9 or more modified nucleosides, 10 or more modified nucleosides, 11 or more modified nucleosides, 12 or more modified nucleosides, 13 or more modified nucleosides, 14 or more modified nucleosides, 15 or more modified nucleosides, 16 or more modified nucleosides, 17 or more modified nucleosides, 18 or more modified nucleosides, 19 or more modified nucleosides, 20 or more modified nucleosides, or 21 or more modified nucleosides. In some embodiments, the oligonucleotide comprises a lipid attached at a 3′ or 5′ terminus of the oligonucleotide. In some embodiments, the lipid comprises cholesterol, myristoyl, palmitoyl, stearoyl, lithocholoyl, docosanoyl, docosahexaenoyl, myristyl, palmityl stearyl, or α-tocopherol, or a combination thereof. In some embodiments, the oligonucleotide comprises a sugar moiety attached at a 3′ or 5′ terminus of the oligonucleotide. The sugar moiety may include an N-acetylgalactosamine (GalNAc) moiety, an N-acetylglucosamine (GlcNAc) moiety, or a mannose moiety. In some embodiments, the oligonucleotide comprises a small interfering RNA (siRNA) comprising a sense strand and an antisense strand. In some embodiments, the sense strand is 12-30 nucleosides in length. In some embodiments, the antisense strand is 12-30 nucleosides in length. Disclosed herein, in some embodiments, are compositions comprising an oligonucleotide that inhibits the expression of MS4A4E wherein the oligonucleotide comprises an siRNA comprising a sense strand and an antisense strand, each strand is independently about 12-30 nucleosides in length, and at least one of the sense strand and the antisense strand comprises a nucleoside sequence comprising about 12-30 contiguous nucleosides of SEQ ID NO: 5117. In some embodiments, any one of the following is true with regard to the sense strand: all purines comprise 2′ fluoro modified purines, and all pyrimidines comprise a mixture of 2′ fluoro and 2′ methyl modified pyrimidines; all purines comprise 2′ methyl modified purines, and all pyrimidines comprise a mixture of 2′ fluoro and 2′ methyl modified pyrimidines; all purines comprise 2′ fluoro modified purines, and all pyrimidines comprise 2′ methyl modified pyrimidines; all pyrimidines comprise 2′ fluoro modified pyrimidines, and all purines comprise a mixture of 2′ fluoro and 2′ methyl modified purines; all pyrimidines comprise 2′ methyl modified pyrimidines, and all purines comprise a mixture of 2′ fluoro and 2′ methyl modified purines; or all pyrimidines comprise 2′ fluoro modified pyrimidines, and all purines comprise 2′ methyl modified purines. In some embodiments, the sense strand comprises any one of modification patterns 1S, 2S, 3S, 4S, 5S, 6S, 7S, 8S, 9S, 10S, 11S, 12S, 13S, 14S, 15S, 16S, 17S, 18S, 19S, 20S, 21S, 22S, 23S, 24S, 25S, 26S, 27S, 28S, 29S, 30S, 31S, 32S, 33S, 34S, 35S, 36S, 37S, 38S, 39S, 40S, 41S, or 42S. In some embodiments, any one of the following is true with regard to the antisense strand: all purines comprise 2′ fluoro modified purines, and all pyrimidines comprise a mixture of 2′ fluoro and 2′ methyl modified pyrimidines; all purines comprise 2′ methyl modified purines, and all pyrimidines comprise a mixture of 2′ fluoro and 2′ methyl modified pyrimidines; all purines comprise 2′ methyl modified purines, and all pyrimidines comprise 2′ fluoro modified pyrimidines; all pyrimidines comprise 2′ fluoro modified pyrimidines, and all purines comprise a mixture of 2′ fluoro and 2′ methyl modified purines; all pyrimidines comprise 2′ methyl modified pyrimidines, and all purines comprise a mixture of 2′ fluoro and 2′ methyl modified purines; or all pyrimidines comprise 2′ methyl modified pyrimidines, and all purines comprise 2′ fluoro modified purines. In some embodiments, the antisense strand comprises any one of modification patterns 1AS, 2AS, 3AS, 4AS, 5AS, 6AS, 7AS, or 8AS.

[0005] Some embodiments include treating a subject. In some embodiments, the subject has non-alcoholic fatty liver disease (NAFLD), non-alcoholic steatohepatitis (NASH), liver fibrosis, liver cirrhosis, diabetes, obesity, metabolic syndrome, hyperlipidemia, hypertriglyceridemia, or heart disease. In some embodiments, the method or treatment includes administering an effective amount of the composition. Disclosed herein, in some embodiments, are methods of treating a subject having non-alcoholic fatty liver disease (NAFLD), comprising administering an effective amount of a composition disclosed herein to the subject. Disclosed herein, in some embodiments, are methods of treating a subject having non-alcoholic steatohepatitis (NASH), comprising administering an effective amount of a composition disclosed herein to the subject. Disclosed herein, in some embodiments, are methods of treating a subject having liver fibrosis, comprising administering an effective amount of a composition disclosed herein to the subject. Disclosed herein, in some embodiments, are methods of treating a subject having cirrhosis, comprising administering an effective amount of a composition disclosed herein to the subject. Disclosed herein, in some embodiments, are methods of treating a subject having type II diabetes, comprising administering an effective amount of a composition disclosed herein to the subject. Disclosed herein, in some embodiments, are methods of treating a subject having obesity, comprising administering an effective amount of a composition disclosed herein to the subject. Disclosed herein, in some embodiments, are methods of treating a subject having metabolic syndrome, comprising administering an effective amount of a composition disclosed herein to the subject. Disclosed herein, in some embodiments, are methods of treating a subject having hyperlipidemia, comprising administering an effective amount of a composition disclosed herein to the subject. Disclosed herein, in some embodiments, are methods of treating a subject having hypertriglyceridemia, comprising administering an effective amount of a composition disclosed herein to the subject. Disclosed herein, in some embodiments, are methods of treating a subject having Ischemic heart disease, comprising administering an effective amount of a composition disclosed herein to the subject. Disclosed herein, in some embodiments, are methods of treating a subject having coronary heart disease, comprising administering an effective amount of a composition disclosed herein to the subject.

### DETAILED DESCRIPTION OF THE INVENTION

[0006] Large-scale human genetic data can improve the success rate of pharmaceutical discovery and development. A Genome Wide Association Study (GWAS) may detect associations between genetic variants and traits in a population sample. A GWAS may enable better understanding of the biology of disease, and provide applicable treatments. A GWAS can utilize genotyping and/or sequencing data, and often involves an evaluation of millions of genetic variants that are relatively evenly distributed across the genome. The most common GWAS design is the case-control study, which involves comparing variant frequencies in cases versus controls. If a variant has a significantly different frequency in cases versus controls, that variant is said to be associated with disease. Association statistics that may be used in a GWAS are p-values, as a measure of statistical significance; odds ratios (OR), as a measure of effect size; or beta coefficients (beta), as a measure of effect size. Researchers often assume an additive genetic model and calculate an allelic odds ratio, which is the increased (or decreased) risk of disease conferred by each additional copy of an allele (compared to carrying no copies of that allele). An additional concept in design and interpretation of GWAS is that of linkage disequilibrium, which is the non-random association of alleles. The presence of linkage disequilibrium can obfuscate which variant is “causal.”

[0007] Functional annotation of variants and/or wet lab experimentation can identify the causal genetic variant identified via GWAS, and in many cases may lead to the identification of disease-causing genes. In particular, understanding the functional effect of a causal genetic variant (for example, loss of protein function, gain of protein function, increase in gene expression, or decrease in gene expression) may allow that variant to be used as a proxy for therapeutic modulation of the target gene, or to gain insight into potential therapeutic efficacy and safety of a therapeutic that modulates that target.

[0008] Identification of such gene-disease associations has provided insights into disease biology and may be used to identify novel therapeutic targets for the pharmaceutical industry. In order to translate the therapeutic insights derived from human genetics, disease biology in patients may be exogenously ‘programmed’ into replicating the observation from human genetics. There are several potential options for therapeutic modalities that may be brought to bear in translating therapeutic targets identified via human genetics into novel medicines. These may include well established therapeutic modalities such as small molecules and monoclonal antibodies, maturing modalities such as oligonucleotides, and emerging modalities such as gene therapy and gene editing. The choice of therapeutic modality can depend on several factors including the location of a target (for example, intracellular, extracellular, or secreted), a relevant tissue (for example, liver) and a relevant indication (for example, a liver disorder).

[0009] Nonalcoholic fatty liver disease (NAFLD), which includes non-alcoholic steatohepatitis (NASH), an advanced form of NAFLD, is becoming increasingly common around the world, and is the most common form of chronic liver disease, affecting about one-quarter of the population.

[0010] The MS4A4E gene is located on chromosome 11 and encodes membrane-spanning 4-domains subfamily A member 4E (MS4A4E), which may include 331 amino acids and have a mass of about 36.6 kDa. MS4A4E may further include at least 4 potential transmembrane domains and N- and C-terminal cytoplasmic domains derived from distinct exons. MS4A4E may be part of the membrane-spanning 4A (MS4A) subfamily, which is part of the CD20-like family. MS4A4E may be membrane bound. An example of a MS4A4E amino acid sequence, and further description of MS4A4E is included at uniprot.org under accession no. A0A494C1L8 (last modified Feb. 10, 2021).

[0011] Here, it is shown that genetic variants that cause inactivation of the MS4A4E gene in humans may be associated with decreased risk of liver diseases and NAFLD, reduced alanine aminotransferase (ALT), triglyceride, and hemoglobin A1C blood levels, increased high-density lipoprotein (HDL) blood levels, and reduced body mass index (BMI). Therefore, inhibition of MS4A4E may serve as a therapeutic strategy for treatment of liver diseases such as NAFLD, NASH, liver fibrosis, or cirrhosis.

[0012] Disclosed herein are compositions comprising an MS4A4E inhibitor. Disclosed herein are compositions comprising an oligonucleotide that targets MS4A4E. The oligonucleotide may include a small interfering RNA (siRNA) or an antisense oligonucleotide (ASO). Also provided herein are methods of treating NAFLD, NASH, liver fibrosis, obesity, type 2 diabetes, metabolic syndrome, hyperlipidemia, hypertriglyceridemia, coronary heart disease, ischemic heart disease or cirrhosis by providing such a composition to a subject in need thereof.

### I. COMPOSITIONS

[0013] Disclosed herein, in some embodiments, are compositions comprising MS4A4E inhibitors. In some embodiments, the MS4A4E inhibitor targets MS4A4E. In some embodiments, the MS4A4E inhibitor reduces MS4A4E mRNA expression. In some embodiments, the MS4A4E inhibitor reduces MS4A4E protein expression. In some embodiments, the MS4A4E inhibitor blocks or hinders MS4A4E protein activity. In some embodiments, a MS4A4E inhibitor described herein is used in a method of treating a disorder in a subject in need thereof. Some embodiments relate to a MS4A4E inhibitor for use in a method of treating a disorder as described herein.

[0014] Some embodiments include an MS4A4E inhibitor (e.g. comprising an oligonucleotide that targets MS4A4E) and when administered to a subject in an effective amount decreases MS4A4E mRNA or MS4A4E protein levels in a cell, fluid or tissue. In some embodiments, the MS4A4E inhibitor decreases MS4A4E mRNA levels in a cell or tissue. In some embodiments, the cell is a liver cell such as a Kupffer cell or hepatocyte. In some embodiments, the cell is an adipocyte. In some embodiments, the cell is a macrophage such as a tissue macrophage. In some embodiments, the tissue is liver tissue. In some embodiments, the tissue is adipose tissue. In some embodiments, the MS4A4E mRNA levels are decreased by about 2.5% or more, about 5% or more, or about 7.5% or more, as compared to prior to administration. In some embodiments, the MS4A4E mRNA levels are decreased by about 10% or more, as compared to prior to administration. In some embodiments, the MS4A4E mRNA levels are decreased by about 20% or more, about 30% or more, about 40% or more, about 50% or more, about 60% or more, about 70% or more, about 80% or more, about 90% or more, or about 100%, as compared to prior to administration. In some embodiments, the MS4A4E mRNA levels are decreased by no more than about 2.5%, no more than about 5%, or no more than about 7.5%, as compared to prior to administration. In some embodiments, the MS4A4E mRNA levels are decreased by no more than about 10%, as compared to prior to administration. In some embodiments, the MS4A4E mRNA levels are decreased by no more than about 20%, no more than about 30%, no more than about 40%, no more than about 50%, no more than about 60%, no more than about 70%, no more than about 80%, or no more than about 90%, as compared to prior to administration. In some embodiments, the MS4A4E mRNA levels are decreased by 2.5%, 5%, 7.5%, 10%, 15%, 20%, 25%, 30%, 35%, 40%, 45%, 50%, 55%, 60%, 65%, 70%, 75%, 80%, 85%, 90%, 95%, or 100%, or by a range defined by any of the two aforementioned percentages.

[0015] Some embodiments include an MS4A4E inhibitor (e.g. comprising an oligonucleotide that targets MS4A4E) and when administered to a subject in an effective amount decreases MS4A4E protein activity in a cell, fluid or tissue. The protein activity may be a specific activity. In some embodiments, the cell is a liver cell such as a Kupffer cell or hepatocyte. In some embodiments, the cell is an adipocyte. In some embodiments, the cell is a macrophage such as a tissue macrophage. In some embodiments, the tissue is liver tissue. In some embodiments, the tissue is adipose tissue. In some embodiments, the MS4A4E protein activity is decreased by about 2.5% or more, about 5% or more, or about 7.5% or more, as compared to prior to administration. In some embodiments, the MS4A4E protein activity is decreased by about 10% or more, as compared to prior to administration. In some embodiments, the MS4A4E protein activity is decreased by about 20% or more, about 30% or more, about 40% or more, about 50% or more, about 60% or more, about 70% or more, about 80% or more, about 90% or more, or about 100%, as compared to prior to administration. In some embodiments, the MS4A4E protein activity is decreased by no more than about 2.5%, no more than about 5%, or no more than about 7.5%, as compared to prior to administration. In some embodiments, the MS4A4E protein activity is decreased by no more than about 10%, as compared to prior to administration. In some embodiments, the MS4A4E protein activity is decreased by no more than about 20%, no more than about 30%, no more than about 40%, no more than about 50%, no more than about 60%, no more than about 70%, no more than about 80%, or no more than about 90%, as compared to prior to administration. In some embodiments, the MS4A4E protein activity is decreased by 2.5%, 5%, 7.5%, 10%, 15%, 20%, 25%, 30%, 35%, 40%, 45%, 50%, 55%, 60%, 65%, 70%, 75%, 80%, 85%, 90%, 95%, or 100%, or by a range defined by any of the two aforementioned percentages.

[0016] In some embodiments, the composition comprises an MS4A4E inhibitor (e.g. comprising an oligonucleotide that targets MS4A4E) and when administered to a subject in an effective amount decreases MS4A4E protein levels in a cell, fluid or tissue. In some embodiments, the cell is a liver cell such as a Kupffer cell or hepatocyte. In some embodiments, the cell is an adipocyte. In some embodiments, the cell is a macrophage such as a tissue macrophage. In some embodiments, the tissue is liver tissue. In some embodiments, the tissue is adipose tissue. In some embodiments, the MS4A4E protein levels are decreased by about 2.5% or more, about 5% or more, or about 7.5% or more, as compared to prior to administration. In some embodiments, the MS4A4E protein levels are decreased by about 10% or more, as compared to prior to administration. In some embodiments, the MS4A4E protein levels are decreased by about 20% or more, about 30% or more, about 40% or more, about 50% or more, about 60% or more, about 70% or more, about 80% or more, about 90% or more, or about 100%, as compared to prior to administration. In some embodiments, the MS4A4E protein levels are decreased by no more than about 2.5%, no more than about 5%, or no more than about 7.5%, as compared to prior to administration. In some embodiments, the MS4A4E protein levels are decreased by no more than about 10%, as compared to prior to administration. In some embodiments, the MS4A4E protein levels are decreased by no more than about 20%, no more than about 30%, no more than about 40%, no more than about 50%, no more than about 60%, no more than about 70%, no more than about 80%, or no more than about 90%, as compared to prior to administration. In some embodiments, the MS4A4E protein levels are decreased by 2.5%, 5%, 7.5%, 10%, 15%, 20%, 25%, 30%, 35%, 40%, 45%, 50%, 55%, 60%, 65%, 70%, 75%, 80%, 85%, 90%, 95%, or 100%, or by a range defined by any of the two aforementioned percentages.

[0017] In some embodiments, the composition comprises an MS4A4E inhibitor (e.g. comprising an oligonucleotide that targets MS4A4E) and when administered to a subject in an effective amount diminishes a liver disease phenotype. The liver disease may include NAFLD, NASH, liver fibrosis, or cirrhosis. In some embodiments, the liver disease phenotype is decreased by about 2.5% or more, about 5% or more, or about 7.5% or more, as compared to prior to administration. In some embodiments, the liver disease phenotype is decreased by about 10% or more, as compared to prior to administration. In some embodiments, the liver disease phenotype is decreased by about 20% or more, about 30% or more, about 40% or more, about 50% or more, about 60% or more, about 70% or more, about 80% or more, about 90% or more, or about 100%, as compared to prior to administration. In some embodiments, the liver disease phenotype is decreased by no more than about 2.5%, no more than about 5%, or no more than about 7.5%, as compared to prior to administration. In some embodiments, the liver disease phenotype is decreased by no more than about 10%, as compared to prior to administration. In some embodiments, the liver disease phenotype is decreased by no more than about 20%, no more than about 30%, no more than about 40%, no more than about 50%, no more than about 60%, no more than about 70%, no more than about 80%, or no more than about 90%, as compared to prior to administration. In some embodiments, the liver disease phenotype is decreased by 2.5%, 5%, 7.5%, 10%, 15%, 20%, 25%, 30%, 35%, 40%, 45%, 50%, 55%, 60%, 65%, 70%, 75%, 80%, 85%, 90%, 95%, or 100%, or by a range defined by any of the two aforementioned percentages.

[0018] In some embodiments, the composition comprises an MS4A4E inhibitor (e.g. comprising an oligonucleotide that targets MS4A4E) and when administered to a subject in an effective amount diminishes a heart disease phenotype. The heart disease may include hypertriglyceridemia, hyperlipidemia, ischemic heart disease, or coronary heart disease. In some embodiments, the heart disease phenotype is decreased by about 2.5% or more, about 5% or more, or about 7.5% or more, as compared to prior to administration. In some embodiments, the heart disease phenotype is decreased by about 10% or more, as compared to prior to administration. In some embodiments, the heart disease phenotype is decreased by about 20% or more, about 30% or more, about 40% or more, about 50% or more, about 60% or more, about 70% or more, about 80% or more, about 90% or more, or about 100%, as compared to prior to administration. In some embodiments, the heart disease phenotype is decreased by no more than about 2.5%, no more than about 5%, or no more than about 7.5%, as compared to prior to administration. In some embodiments, the heart disease phenotype is decreased by no more than about 10%, as compared to prior to administration. In some embodiments, the heart disease phenotype is decreased by no more than about 20%, no more than about 30%, no more than about 40%, no more than about 50%, no more than about 60%, no more than about 70%, no more than about 80%, or no more than about 90%, as compared to prior to administration. In some embodiments, the heart disease phenotype is decreased by 2.5%, 5%, 7.5%, 10%, 15%, 20%, 25%, 30%, 35%, 40%, 45%, 50%, 55%, 60%, 65%, 70%, 75%, 80%, 85%, 90%, 95%, or 100%, or by a range defined by any of the two aforementioned percentages.

[0019] In some embodiments, the composition comprises an MS4A4E inhibitor (e.g. comprising an oligonucleotide that targets MS4A4E) and when administered to a subject in an effective amount enhances a protective phenotype against a disease in the subject. The disease may include NAFLD, NASH, liver fibrosis, ischemic heart disease, coronary heart disease, type II diabetes, obesity, metabolic syndrome, hyperlipidemia, hypertriglyceridemia or cirrhosis. In some embodiments, the protective phenotype is increased by about 2.5% or more, about 5% or more, or about 7.5% or more, as compared to prior to administration. In some embodiments, the protective phenotype is increased by about 10% or more, as compared to prior to administration. In some embodiments, the protective phenotype is increased by about 20% or more, about 30% or more, about 40% or more, about 50% or more, about 60% or more, about 70% or more, about 80% or more, about 90% or more, or about 100% or more, as compared to prior to administration. In some embodiments, the protective phenotype is increased by about 200% or more, about 300% or more, about 400% or more, about 500% or more, about 600% or more, about 700% or more, about 800% or more, about 900% or more, or about 1000% or more, as compared to prior to administration. In some embodiments, the protective phenotype is increased by no more than about 2.5%, no more than about 5%, or no more than about 7.5%, as compared to prior to administration. In some embodiments, the protective phenotype is increased by no more than about 10%, as compared to prior to administration. In some embodiments, the protective phenotype is increased by no more than about 20%, no more than about 30%, no more than about 40%, no more than about 50%, no more than about 60%, no more than about 70%, no more than about 80%, no more than about 90%, or no more than about 100%, as compared to prior to administration. In some embodiments, the protective phenotype is increased by no more than about 200%, no more than about 300%, no more than about 400%, no more than about 500%, no more than about 600%, no more than about 700%, no more than about 800%, no more than about 900%, or no more than about 1000%, as compared to prior to administration. In some embodiments, the protective phenotype is increased by 2.5%, 5%, 7.5%, 10%, 15%, 20%, 25%, 30%, 35%, 40%, 45%, 50%, 55%, 60%, 65%, 70%, 75%, 80%, 85%, 90%, 95%, 100%, 150%, 200%, 250%, 300%, 400%, 500%, 600%, 700%, 800%, 900%, or 1000%, or by a range defined by any of the two aforementioned percentages.

[0020] In some embodiments, the composition comprises an MS4A4E inhibitor (e.g. comprising an oligonucleotide that targets MS4A4E) and when administered to a subject in an effective amount decreases a liver fat percentage in the subject. In some embodiments, the liver fat percentage is decreased by about 2.5% or more, about 5% or more, or about 7.5% or more, as compared to prior to administration. In some embodiments, the liver fat percentage is decreased by about 10% or more, as compared to prior to administration. In some embodiments, the liver fat percentage is decreased by about 20% or more, about 30% or more, about 40% or more, about 50% or more, about 60% or more, about 70% or more, about 80% or more, about 90% or more, or about 100%, as compared to prior to administration. In some embodiments, the liver fat percentage is decreased by no more than about 2.5%, no more than about 5%, or no more than about 7.5%, as compared to prior to administration. In some embodiments, the liver fat percentage is decreased by no more than about 10%, as compared to prior to administration. In some embodiments, the liver fat percentage is decreased by no more than about 20%, no more than about 30%, no more than about 40%, no more than about 50%, no more than about 60%, no more than about 70%, no more than about 80%, or no more than about 90%, as compared to prior to administration. In some embodiments, the liver fat percentage is decreased by 2.5%, 5%, 7.5%, 10%, 15%, 20%, 25%, 30%, 35%, 40%, 45%, 50%, 55%, 60%, 65%, 70%, 75%, 80%, 85%, 90%, 95%, or 100%, or by a range defined by any of the two aforementioned percentages.

[0021] In some embodiments, the composition comprises an MS4A4E inhibitor (e.g. comprising an oligonucleotide that targets MS4A4E) and when administered to a subject in an effective amount decreases a liver fibrosis score in the subject. In some embodiments, the liver fibrosis score is decreased by about 2.5% or more, about 5% or more, or about 7.5% or more, as compared to prior to administration. In some embodiments, the liver fibrosis score is decreased by about 10% or more, as compared to prior to administration. In some embodiments, the liver fibrosis score is decreased by about 20% or more, about 30% or more, about 40% or more, about 50% or more, about 60% or more, about 70% or more, about 80% or more, about 90% or more, or about 100%, as compared to prior to administration. In some embodiments, the liver fibrosis score is decreased by no more than about 2.5%, no more than about 5%, or no more than about 7.5%, as compared to prior to administration. In some embodiments, the liver fibrosis score is decreased by no more than about 10%, as compared to prior to administration. In some embodiments, the liver fibrosis score is decreased by no more than about 20%, no more than about 30%, no more than about 40%, no more than about 50%, no more than about 60%, no more than about 70%, no more than about 80%, or no more than about 90%, as compared to prior to administration. In some embodiments, the liver fibrosis score is decreased by 2.5%, 5%, 7.5%, 10%, 15%, 20%, 25%, 30%, 35%, 40%, 45%, 50%, 55%, 60%, 65%, 70%, 75%, 80%, 85%, 90%, 95%, or 100%, or by a range defined by any of the two aforementioned percentages.

[0022] In some embodiments, the composition comprises an MS4A4E inhibitor (e.g. comprising an oligonucleotide that targets MS4A4E) and when administered to a subject in an effective amount decreases a NAFLD activity score in the subject. In some embodiments, the NAFLD activity score is decreased by about 2.5% or more, about 5% or more, or about 7.5% or more, as compared to prior to administration. In some embodiments, the NAFLD activity score is decreased by about 10% or more, as compared to prior to administration. In some embodiments, the NAFLD activity score is decreased by about 20% or more, about 30% or more, about 40% or more, about 50% or more, about 60% or more, about 70% or more, about 80% or more, about 90% or more, or about 100%, as compared to prior to administration. In some embodiments, the NAFLD activity score is decreased by no more than about 2.5%, no more than about 5%, or no more than about 7.5%, as compared to prior to administration. In some embodiments, the NAFLD activity score is decreased by no more than about 10%, as compared to prior to administration. In some embodiments, the NAFLD activity score is decreased by no more than about 20%, no more than about 30%, no more than about 40%, no more than about 50%, no more than about 60%, no more than about 70%, no more than about 80%, or no more than about 90%, as compared to prior to administration. In some embodiments, the NAFLD activity score is decreased by 2.5%, 5%, 7.5%, 10%, 15%, 20%, 25%, 30%, 35%, 40%, 45%, 50%, 55%, 60%, 65%, 70%, 75%, 80%, 85%, 90%, 95%, or 100%, or by a range defined by any of the two aforementioned percentages.

[0023] In some embodiments, the composition comprises an MS4A4E inhibitor (e.g. comprising an oligonucleotide that targets MS4A4E) and when administered to a subject in an effective amount decreases blood alanine aminotransferase (ALT) levels in the subject. The blood may include serum or plasma. In some embodiments, the blood ALT levels are decreased by about 2.5% or more, about 5% or more, or about 7.5% or more, as compared to prior to administration. In some embodiments, the blood ALT levels are decreased by about 10% or more, as compared to prior to administration. In some embodiments, the blood ALT levels are decreased by about 20% or more, about 30% or more, about 40% or more, about 50% or more, about 60% or more, about 70% or more, about 80% or more, about 90% or more, or about 100%, as compared to prior to administration. In some embodiments, the blood ALT levels are decreased by no more than about 2.5%, no more than about 5%, or no more than about 7.5%, as compared to prior to administration. In some embodiments, the blood ALT levels are decreased by no more than about 10%, as compared to prior to administration. In some embodiments, the blood ALT levels are decreased by no more than about 20%, no more than about 30%, no more than about 40%, no more than about 50%, no more than about 60%, no more than about 70%, no more than about 80%, or no more than about 90%, as compared to prior to administration. In some embodiments, the blood ALT levels are decreased by 2.5%, 5%, 7.5%, 10%, 15%, 20%, 25%, 30%, 35%, 40%, 45%, 50%, 55%, 60%, 65%, 70%, 75%, 80%, 85%, 90%, 95%, or 100%, or by a range defined by any of the two aforementioned percentages.

[0024] In some embodiments, the composition comprises an MS4A4E inhibitor (e.g. comprising an oligonucleotide that targets MS4A4E) and when administered to a subject in an effective amount decreases blood aspartate aminotransferase (AST) levels in the subject. The blood may include serum or plasma. In some embodiments, the blood AST levels are decreased by about 2.5% or more, about 5% or more, or about 7.5% or more, as compared to prior to administration. In some embodiments, the blood AST levels are decreased by about 10% or more, as compared to prior to administration. In some embodiments, the blood AST levels are decreased by about 20% or more, about 30% or more, about 40% or more, about 50% or more, about 60% or more, about 70% or more, about 80% or more, about 90% or more, or about 100%, as compared to prior to administration. In some embodiments, the blood AST levels are decreased by no more than about 2.5%, no more than about 5%, or no more than about 7.5%, as compared to prior to administration. In some embodiments, the blood AST levels are decreased by no more than about 10%, as compared to prior to administration. In some embodiments, the blood AST levels are decreased by no more than about 20%, no more than about 30%, no more than about 40%, no more than about 50%, no more than about 60%, no more than about 70%, no more than about 80%, or no more than about 90%, as compared to prior to administration. In some embodiments, the blood AST levels are decreased by 2.5%, 5%, 7.5%, 10%, 15%, 20%, 25%, 30%, 35%, 40%, 45%, 50%, 55%, 60%, 65%, 70%, 75%, 80%, 85%, 90%, 95%, or 100%, or by a range defined by any of the two aforementioned percentages.

[0025] In some embodiments, the composition comprises an MS4A4E inhibitor (e.g. comprising an oligonucleotide that targets MS4A4E) and when administered to a subject in an effective amount decreases blood triglyceride levels in the subject. The blood may include serum or plasma. In some embodiments, the blood triglyceride levels are decreased by about 2.5% or more, about 5% or more, or about 7.5% or more, as compared to prior to administration. In some embodiments, the blood triglyceride levels are decreased by about 10% or more, as compared to prior to administration. In some embodiments, the blood triglyceride levels are decreased by about 20% or more, about 30% or more, about 40% or more, about 50% or more, about 60% or more, about 70% or more, about 80% or more, about 90% or more, as compared to prior to administration. In some embodiments, the blood triglyceride levels are decreased by no more than about 2.5%, no more than about 5%, or no more than about 7.5%, as compared to prior to administration. In some embodiments, the blood triglyceride levels are decreased by no more than about 10%, as compared to prior to administration. In some embodiments, the blood triglyceride levels are decreased by no more than about 20%, no more than about 30%, no more than about 40%, no more than about 50%, no more than about 60%, no more than about 70%, no more than about 80%, or no more than about 90%, as compared to prior to administration. In some embodiments, the blood triglyceride levels are decreased by 2.5%, 5%, 7.5%, 10%, 15%, 20%, 25%, 30%, 35%, 40%, 45%, 50%, 55%, 60%, 65%, 70%, 75%, 80%, 85%, 90%, 95%, or 99%, or by a range defined by any of the two aforementioned percentages.

[0026] In some embodiments, the composition comprises an MS4A4E inhibitor (e.g. comprising an oligonucleotide that targets MS4A4E) and when administered to a subject in an effective amount increases blood high-density lipoprotein (HDL) levels in the subject. In some embodiments, the blood HDL levels are increased by about 2.5% or more, about 5% or more, or about 7.5% or more, as compared to prior to administration. In some embodiments, the blood HDL levels are increased by about 10% or more, as compared to prior to administration. In some embodiments, the blood HDL levels are increased by about 20% or more, about 30% or more, about 40% or more, about 50% or more, about 60% or more, about 70% or more, about 80% or more, about 90% or more, or about 100% or more, as compared to prior to administration. In some embodiments, the blood HDL levels are increased by about 200% or more, about 300% or more, about 400% or more, about 500% or more, about 600% or more, about 700% or more, about 800% or more, about 900% or more, or about 1000% or more, as compared to prior to administration. In some embodiments, the blood HDL levels are increased by no more than about 2.5%, no more than about 5%, or no more than about 7.5%, as compared to prior to administration. In some embodiments, the blood HDL levels are increased by no more than about 10%, as compared to prior to administration. In some embodiments, the blood HDL levels are increased by no more than about 20%, no more than about 30%, no more than about 40%, no more than about 50%, no more than about 60%, no more than about 70%, no more than about 80%, no more than about 90%, or no more than about 100%, as compared to prior to administration. In some embodiments, the blood HDL levels are increased by no more than about 200%, no more than about 300%, no more than about 400%, no more than about 500%, no more than about 600%, no more than about 700%, no more than about 800%, no more than about 900%, or no more than about 1000%, as compared to prior to administration. In some embodiments, the blood HDL levels are increased by 2.5%, 5%, 7.5%, 10%, 15%, 20%, 25%, 30%, 35%, 40%, 45%, 50%, 55%, 60%, 65%, 70%, 75%, 80%, 85%, 90%, 95%, 100%, 150%, 200%, 250%, 300%, 400%, 500%, 600%, 700%, 800%, 900%, or 1000%, or by a range defined by any of the two aforementioned percentages.

[0027] In some embodiments, the composition comprises an MS4A4E inhibitor (e.g. comprising an oligonucleotide that targets MS4A4E) and when administered to a subject in an effective amount decreases blood hemoglobin A1C levels in the subject. The blood may include serum or plasma. In some embodiments, the blood hemoglobin A1C levels are decreased by about 2.5% or more, about 50% or more, or about 7.5% or more, as compared to prior to administration. In some embodiments, the blood hemoglobin A1C levels are decreased by about 10% or more, as compared to prior to administration. In some embodiments, the blood hemoglobin A1C levels are decreased by about 20% or more, about 30% or more, about 40% or more, about 50% or more, about 60% or more, about 70% or more, about 80% or more, about 90% or more, as compared to prior to administration. In some embodiments, the blood hemoglobin A1C levels are decreased by no more than about 2.5%, no more than about 5%, or no more than about 7.5%, as compared to prior to administration. In some embodiments, the blood hemoglobin A1C levels are decreased by no more than about 10%, as compared to prior to administration. In some embodiments, the blood hemoglobin A1C levels are decreased by no more than about 20%, no more than about 30%, no more than about 40%, no more than about 50%, no more than about 60%, no more than about 70%, no more than about 80%, or no more than about 90%, as compared to prior to administration. In some embodiments, the blood hemoglobin A1C levels are decreased by 2.5%, 5%, 7.5%, 10%, 15%, 20%, 25%, 30%, 35%, 40%, 45%, 50%, 55%, 60%, 65%, 70%, 75%, 80%, 85%, 90%, or 95%, or by a range defined by any of the two aforementioned percentages.

[0028] In some embodiments, the composition comprises an MS4A4E inhibitor (e.g. comprising an oligonucleotide that targets MS4A4E) and when administered to a subject in an effective amount decreases the subject's body mass index (BMI). In some embodiments, the subject's BMI is decreased by about 2.5% or more, about 5% or more, or about 7.5% or more, as compared to prior to administration. In some embodiments, the subject's BMI is decreased by about 10% or more, as compared to prior to administration. In some embodiments, the subject's BMI is decreased by about 20% or more, about 30% or more, about 40% or more, about 50% or more, about 60% or more, about 70% or more, about 80% or more, about 90% or more, as compared to prior to administration. In some embodiments, the subject's BMI is decreased by no more than about 2.5%, no more than about 5%, or no more than about 7.5%, as compared to prior to administration. In some embodiments, the subject's BMI is decreased by no more than about 10%, as compared to prior to administration. In some embodiments, the subject's BMI is decreased by no more than about 20%, no more than about 30%, no more than about 40%, no more than about 50%, no more than about 60%, no more than about 70%, no more than about 80%, or no more than about 90%, as compared to prior to administration. In some embodiments, the subject's BMI is decreased by 2.5%, 5%, 7.5%, 10%, 15%, 20%, 25%, 30%, 35%, 40%, 45%, 50%, 55%, 60%, 65%, 70%, 75%, 80%, 85%, 90%, or 95%, or by a range defined by any of the two aforementioned percentages.

[0029] In some embodiments, the composition comprises an MS4A4E inhibitor (e.g. comprising an oligonucleotide that targets MS4A4E) and when administered to a subject in an effective amount decreases the subject's blood gamma-glutamyl-transferase (GGT). In some embodiments, the subject's blood GGT is decreased by about 2.5% or more, about 5% or more, or about 7.5% or more, as compared to prior to administration. In some embodiments, the subject's blood GGT is decreased by about 10% or more, as compared to prior to administration. In some embodiments, the subject's blood GGT is decreased by about 20% or more, about 30% or more, about 40% or more, about 50% or more, about 60% or more, about 70% or more, about 80% or more, about 90% or more, as compared to prior to administration. In some embodiments, the subject's blood GGT is decreased by no more than about 2.5%, no more than about 5%, or no more than about 7.5%, as compared to prior to administration. In some embodiments, the subject's blood GGT is decreased by no more than about 10%, as compared to prior to administration. In some embodiments, the subject's blood GGT is decreased by no more than about 20%, no more than about 30%, no more than about 40%, no more than about 50%, no more than about 60%, no more than about 70%, no more than about 80%, or no more than about 90%, as compared to prior to administration. In some embodiments, the subject's blood GGT is decreased by 2.5%, 5%, 7.5%, 10%, 15%, 20%, 25%, 30%, 35%, 40%, 45%, 50%, 55%, 60%, 65%, 70%, 75%, 80%, 85%, 90%, or 95%, or by a range defined by any of the two aforementioned percentages.

[0030] In some embodiments, the composition comprises an MS4A4E inhibitor (e.g. comprising an oligonucleotide that targets MS4A4E) and when administered to a subject in an effective amount decreases a metabolic disorder-related parameter. In some embodiments, the metabolic disorder comprises obesity. In some embodiments, the metabolic disorder comprises metabolic syndrome. In some embodiments, the metabolic disorder comprises hyperlipidemia. In some embodiments, the metabolic disorder comprises hypertriglyceridemia. In some embodiments, the metabolic disorder comprises diabetes. In some embodiments, the diabetes comprises type II diabetes. The metabolic disorder-related parameter may include a hemoglobin A1C measurement. The metabolic disorder-related parameter may include a thyroid stimulating hormone measurement. The metabolic disorder-related parameter may include a triglyceride measurement. The metabolic disorder-related parameter may include a body mass index (BMI) measurement. The metabolic disorder-related parameter may include a body weight measurement. The metabolic disorder-related parameter may include a waist circumference measurement. The metabolic disorder-related parameter may include a hip circumference measurement. The metabolic disorder-related parameter may include a waist-hip ratio. The metabolic disorder-related parameter may include a body fat percentage. The metabolic disorder-related parameter may include a blood glucose measurement. The metabolic disorder-related parameter may include a glucose tolerance measurement. The metabolic disorder-related parameter may include an insulin measurement. The metabolic disorder-related parameter may include an insulin sensitivity measurement. The metabolic disorder-related parameter may include a cholesterol measurement such as a non-HDL a cholesterol measurement. The metabolic disorder-related parameter may include a blood pressure measurement. In some embodiments, the metabolic disorder-related parameter is decreased by about 2.5% or more, about 5% or more, or about 7.5% or more, as compared to prior to administration. In some embodiments, the metabolic disorder-related parameter is decreased by about 10% or more, as compared to prior to administration. In some embodiments, the metabolic disorder-related parameter is decreased by about 20% or more, about 30% or more, about 40% or more, about 50% or more, about 60% or more, about 70% or more, about 80% or more, about 90% or more, or about 95%, as compared to prior to administration. In some embodiments, the metabolic disorder-related parameter is decreased by no more than about 2.5%, no more than about 5%, or no more than about 7.5%, as compared to prior to administration. In some embodiments, the metabolic disorder-related parameter is decreased by no more than about 10%, as compared to prior to administration. In some embodiments, the metabolic disorder-related parameter is decreased by no more than about 20%, no more than about 30%, no more than about 40%, no more than about 50%, no more than about 60%, no more than about 70%, no more than about 80%, no more than about 90%, or no more than about 95%, as compared to prior to administration. In some embodiments, the metabolic disorder-related parameter is decreased by 2.5%, 5%, 7.5%, 10%, 15%, 20%, 25%, 30%, 35%, 40%, 45%, 50%, 55%, 60%, 65%, 70%, 75%, 80%, 85%, 90%, or 95%, or by a range defined by any of the two aforementioned percentages.

### A. Inhibitors of MS4A4E

[0031] Provided herein, in some embodiments, are MS4A4E inhibitors. Some examples of MS4A4E inhibitors are provided in Table 1. Some examples of MS4A4E inhibitors may include a dsRNA agent (e.g., siRNA), antisense oligonucleotide, a small molecule compound, or an antibody.

TABLE 1
Examples of MS4A4E Inhibitors

| | | Example | |
|---|---|---|---|
| Inhibitor Type | Example Description | Target | Example Mode of Action |
| Antisense | Single-stranded DNA or | mRNA | Prevents translation or splicing |
| Oligonucleotide (ASO) | RNA | | |
| Small Interfering RNA | Double-stranded RNA | mRNA | Induces innate gene-silencing causing |
| (siRNA) | | | target degradation |
| Anti-Micro RNA | Single-stranded RNA | microRNA | Inactivates microRNA, affecting |
| | | | expression |
| Micro-RNA Mimic | Double-stranded RNA | mRNA | Prevents translation |
| mRNA Analog | Single-stranded RNA | Ribosomes | Induces translation of novel protein |
| Aptamer | Single-stranded DNA or | Many | Inactivates or modifies target |
| | RNA | | |
| CRISPR | gRNA and Cas9 enzyme | DNA | Inactivates gene or alters DNA sequence |
| Small Molecule | Low molecular weight | Protein | Inhibits a specific function of a protein or |
| Inhibitor | organic compound | | disrupts protein-protein interactions |
| Antibody | Protein-binding | Protein | Specifically binds to and inhibits protein |
| | immunoglobulin | | function, or induces phagocytosis |

[0032] In some embodiments, the MS4A4E inhibitor includes a small molecule. An example of a small molecule is an organic compound having a molecular weight of less than 900 daltons. The small molecule MS4A4E inhibitor may bind to a functional site of MS4A4E and inhibit its function.

[0033] In some embodiments, the MS4A4E inhibitor includes an antibody or antibody fragment. Some examples of antibodies or antibody fragments may include a single chain variable fragment (scFv), a single domain antibody (sdA), a Fab, or a Fab′. In some embodiments, the MS4A4E inhibitor includes an antibody. In some embodiments, the MS4A4E inhibitor includes an antibody fragment. The antibody or antibody fragment may bind specifically to the MS4A4E protein and inhibit its function, or may result in phagocytosis or destruction of the MS4A4E protein by an immune cell.

[0034] In some embodiments, the MS4A4E inhibitor includes an oligonucleotide. Some examples of oligonucleotides such as siRNAs and ASOs are described further below. Disclosed herein, in some embodiments, are compositions comprising an oligonucleotide. In some embodiments, the composition comprises an oligonucleotide that targets MS4A4E. In some embodiments, the composition consists of an oligonucleotide that targets MS4A4E. In some embodiments, the oligonucleotide reduces MS4A4E mRNA expression in the subject. In some embodiments, the oligonucleotide reduces MS4A4E protein expression in the subject. The oligonucleotide may include a small interfering RNA (siRNA) described herein. The oligonucleotide may include an antisense oligonucleotide (ASO) described herein. In some embodiments, a composition described herein is used in a method of treating a disorder in a subject in need thereof. Some embodiments relate to a composition comprising an oligonucleotide for use in a method of treating a disorder as described herein. Some embodiments relate to use of a composition comprising an oligonucleotide, in a method of treating a disorder as described herein.

### B. siRNAs

[0035] In some embodiments, the composition comprises an oligonucleotide that targets MS4A4E, wherein the oligonucleotide comprises a small interfering RNA (siRNA). In some embodiments, the composition comprises an oligonucleotide that targets MS4A4E, wherein the oligonucleotide comprises a small interfering RNA (siRNA) comprising a sense strand and an antisense strand.

[0036] In some embodiments, the composition comprises an oligonucleotide that inhibits the expression of MS4A4E, wherein the oligonucleotide comprises an siRNA comprising a sense strand and an antisense strand, wherein the sense strand is 12-30 nucleosides in length. In some embodiments, the composition comprises a sense strange that is 10, 11, 12, 13, 14, 15, 16, 17, 18, 19, 20, 21, 22, 23, 24, 25, 26, 27, 28, 29, or 30 nucleosides in length, or a range defined by any of the two aforementioned numbers. The sense strand may be 14-30 nucleosides in length. In some embodiments, the composition comprises an antisense strand is 12-30 nucleosides in length. In some embodiments, the composition comprises an antisense strand that is 10, 11, 12, 13, 14, 15, 16, 17, 18, 19, 20, 21, 22, 23, 24, 25, 26, 27, 28, 29, or 30 nucleosides in length, or a range defined by any of the two aforementioned numbers. The antisense strand may be 14-30 nucleosides in length.

[0037] In some embodiments, the composition comprises an oligonucleotide that inhibits the expression of MS4A4E, wherein the oligonucleotide comprises an siRNA comprising a sense strand and an antisense strand, each strand is independently about 12-30 nucleosides in length, and at least one of the sense strand and the antisense strand comprises a nucleoside sequence comprising about 12-30 contiguous nucleosides of a full-length human MS4A4E mRNA sequence such as SEQ ID NO: 5117. In some embodiments, at least one of the sense strand and the antisense strand comprise a nucleoside sequence comprising at least about 10, 11, 12, 13, 14, 15, 16, 17, 18, 19, 20, 21, 22, 23, 24, 25, 26, 27, 28, 29, 30, or more contiguous nucleosides of one of SEQ ID NO: 5117.

[0038] In some embodiments, the composition comprises an oligonucleotide that inhibits the expression of MS4A4E, wherein the oligonucleotide comprises an siRNA comprising a sense strand and an antisense strand, wherein the sense strand and the antisense strand form a double-stranded RNA duplex. In some embodiments, the first base pair of the double-stranded RNA duplex is an AU base pair.

[0039] In some embodiments, the sense strand further comprises a 3′ overhang. In some embodiments, the 3′ overhang comprises 1, 2, 3, 4, 5, 6, 7, 8, 9, or 10 nucleosides, or a range of nucleotides defined by any two of the aforementioned numbers. In some embodiments, the 3′ overhang comprises 1, 2, or more nucleosides. In some embodiments, the 3′ overhang comprises 2 nucleosides. In some embodiments, the sense strand further comprises a 5′ overhang. In some embodiments, the 5′ overhang comprises 1, 2, 3, 4, 5, 6, 7, 8, 9, or 10 nucleosides, or a range of nucleotides defined by any two of the aforementioned numbers. In some embodiments, the 5′ overhang comprises 1, 2, or more nucleosides. In some embodiments, the 5′ overhang comprises 2 nucleosides. The sense strand may comprise a lipid moiety. The sense strand may comprise a GalNAc moiety.

[0040] In some embodiments, the antisense strand further comprises a 3′ overhang. In some embodiments, the 3′ overhang comprises 1, 2, 3, 4, 5, 6, 7, 8, 9, or 10 nucleosides, or a range of nucleotides defined by any two of the aforementioned numbers. In some embodiments, the 3′ overhang comprises 1, 2, or more nucleosides. In some embodiments, the 3′ overhang comprises 2 nucleosides. In some embodiments, the antisense strand further comprises a 5′ overhang. In some embodiments, the 5′ overhang comprises 1, 2, 3, 4, 5, 6, 7, 8, 9, or 10 nucleosides, or a range of nucleotides defined by any two of the aforementioned numbers. In some embodiments, the 5′ overhang comprises 1, 2, or more nucleosides. In some embodiments, the 5′ overhang comprises 2 nucleosides. The sense strand or antisense strand may comprise a lipid moiety or a GalNAc moiety.

[0041] In some embodiments, the composition comprises an oligonucleotide that inhibits the expression of MS4A4E, wherein the oligonucleotide comprises an siRNA comprising a sense strand and an antisense strand, wherein the siRNA binds with a 19mer in a human MS4A4E mRNA. In some embodiments, the siRNA binds with a 12mer, a 13mer, a 14mer, a 15mer, a 16mer, a 17mer, a 18mer, a 19mer, a 20mer, a 21mer, a 22mer, a 23mer, a 24mer, or a 25mer in a human MS4A4E mRNA.

[0042] In some embodiments, the composition comprises an oligonucleotide that inhibits the expression of MS4A4E, wherein the oligonucleotide comprises an siRNA comprising a sense strand and an antisense strand, wherein the siRNA binds with a 17mer in a non-human primate MS4A4E mRNA. In some embodiments, the siRNA binds with a 12mer, a 13mer, a 14mer, a 15mer, a 16mer, a 17mer, a 18mer, a 19mer, a 20mer, a 21mer, a 22mer, a 23mer, a 24mer, or a 25mer in a non-human primate MS4A4E mRNA.

[0043] In some embodiments, the composition comprises an oligonucleotide that inhibits the expression of MS4A4E, wherein the oligonucleotide comprises an siRNA comprising a sense strand and an antisense strand, wherein the siRNA binds with a human MS4A4E mRNA and less than or equal to 20 human off-targets, with no more than 2 mismatches in the antisense strand. In some embodiments, the siRNA binds with a human MS4A4E mRNA and less than or equal to 10 human off-targets, with no more than 2 mismatches in the antisense strand. In some embodiments, the siRNA binds with a human MS4A4E mRNA and less than or equal to 30 human off-targets, with no more than 2 mismatches in the antisense strand. In some embodiments, the siRNA binds with a human MS4A4E mRNA and less than or equal to 40 human off-targets, with no more than 2 mismatches in the antisense strand. In some embodiments, the siRNA binds with a human MS4A4E mRNA and less than or equal to 50 human off-targets, with no more than 2 mismatches in the antisense strand. In some embodiments, the siRNA binds with a human MS4A4E mRNA and less than or equal to 10 human off-targets, with no more than 3 mismatches in the antisense strand. In some embodiments, the siRNA binds with a human MS4A4E mRNA and less than or equal to 20 human off-targets, with no more than 3 mismatches in the antisense strand. In some embodiments, the siRNA binds with a human MS4A4E mRNA and less than or equal to 30 human off-targets, with no more than 3 mismatches in the antisense strand. In some embodiments, the siRNA binds with a human MS4A4E mRNA and less than or equal to 40 human off-targets, with no more than 3 mismatches in the antisense strand. In some embodiments, the siRNA binds with a human MS4A4E mRNA and less than or equal to 50 human off-targets, with no more than 3 mismatches in the antisense strand.

[0044] In some embodiments, the composition comprises an oligonucleotide that inhibits the expression of MS4A4E, wherein the oligonucleotide comprises an siRNA comprising a sense strand and an antisense strand, siRNA binds with a human MS4A4E mRNA target site that does not harbor an SNP, with a minor allele frequency (MAF) greater or equal to 1% (pos. 2-18). In some embodiments, the MAF is greater or equal to about 2%, about 3%, about 4%, about 5%, about 6%, about 7%, about 8%, about 9%, about 10%, about 11%, about 12%, about 13%, about 14%, about 15%, about 16%, about 17%, about 18%, about 19%, or about 20%.

[0045] In some embodiments, the siRNA comprises a sense strand having a sequence in accordance with any of SEQ ID NOs: 1-2447. In some embodiments, the sense strand sequence comprises or consists of sequence at least 75% identical to any one of SEQ ID NOs: 1-2447, at least 80% identical to any one of SEQ ID NOs: 1-2447, at least 85% identical to of any one of SEQ ID NOs: 1-2447, at least 90% identical to any one of SEQ ID NOs: 1-2447, or at least 95% identical to any one of SEQ ID NOs: 1-2447. In some embodiments, the sense strand sequence comprises or consists of the sequence of any one of SEQ ID NOs: 1-2447, or a sense strand sequence thereof having 1, 2, 3, or 4 nucleoside substitutions, additions, or deletions. In some embodiments, the sense strand sequence comprises or consists of the sequence of any one of SEQ ID NOs: 1-2447, or a sense strand sequence thereof having 1 or 2 nucleoside substitutions, additions, or deletions. In some embodiments, the sense strand sequence comprises or consists of a sequence 100% identical to SEQ ID NOs: 1-2447. The sense strand sequence may include the first 5, 6, 7, 8, 9, 10, 11, 12, 13, 14, 15, 16, 17, 18, or 19 nucleotides (in the 5′ to 3′ direction) of any of the aforementioned sequences. The sense strand sequence may include the last 5, 6, 7, 8, 9, 10, 11, 12, 13, 14, 15, 16, 17, 18, or 19 nucleotides (in the 5′ to 3′ direction) of any of the aforementioned sequences. The sense strand may comprise a modification pattern described herein. The sense strand may comprise an overhang. The sense strand may comprise a lipid moiety. The sense strand may comprise a GalNAc moiety.

[0046] In some embodiments, the siRNA comprises an antisense strand having a sequence in accordance with any of SEQ ID NOs: 2448-4894. In some embodiments, the antisense strand sequence comprises or consists of sequence at least 75% identical to any one of SEQ ID NOs: 2448-4894, at least 80% identical to any one of SEQ ID NOs: 2448-4894, at least 85% identical to of any one of SEQ ID NOs: 2448-4894, at least 90% identical to any one of SEQ ID NOs: 2448-4894, or at least 95% identical to any one of SEQ ID NOs: 2448-4894. In some embodiments, the antisense strand sequence comprises or consists of the sequence of any one of SEQ ID NOs: 2448-4894, or an antisense strand sequence thereof having 1, 2, 3, or 4 nucleoside substitutions, additions, or deletions. In some embodiments, the antisense strand sequence comprises or consists of the sequence of any one of SEQ ID NOs: 2448-4894, or an antisense strand sequence thereof having 1 or 2 nucleoside substitutions, additions, or deletions. In some embodiments, the antisense strand sequence comprises or consists of a sequence 100% identical to SEQ ID NOs: 2448-4894. The antisense strand sequence may include the first 5, 6, 7, 8, 9, 10, 11, 12, 13, 14, 15, 16, 17, 18, or 19 nucleotides (in the 5′ to 3′ direction) of any of the aforementioned sequences. The antisense strand sequence may include the last 5, 6, 7, 8, 9, 10, 11, 12, 13, 14, 15, 16, 17, 18, or 19 nucleotides (in the 5′ to 3′ direction) of any of the aforementioned sequences. The antisense strand may comprise an overhang. The antisense strand may comprise a modification pattern described herein. The antisense strand may comprise a lipid moiety or a GalNAc moiety.

[0047] In some embodiments, the siRNA comprises a sense strand or antisense strand having a sequence in accordance with the sense strand or antisense strand sequence of an siRNA of subset A. In some embodiments, the sense strand or antisense strand comprises a sequence at least 75% identical, at least 80% identical, at least 85% identical, at least 90% identical, or at least 95% identical, to a sense strand or antisense strand sequence of subset A. In some embodiments, the sense strand or antisense strand comprises a sequence of a sense or antisense strand of subset A, or a sequence thereof having 3 or 4 nucleoside substitutions, additions, or deletions. In some embodiments, the sense strand or antisense strand comprises a sequence of a sense or antisense strand of subset A, or a sequence thereof having 1 or 2 nucleoside substitutions, additions, or deletions. In some embodiments, the sense strand or antisense sequence comprises or consists of a sequence 100% identical to a sense strand or antisense strand sequence of subset A. The sense strand or antisense strand may comprise any modifications described herein. The sense strand or antisense strand may comprise a lipid moiety or a GalNAc moiety.

[0048] In some embodiments, the siRNA comprises a sense strand or antisense strand having a sequence in accordance with the sense strand or antisense strand sequence of an siRNA of subset B. In some embodiments, the sense strand or antisense strand comprises a sequence at least 750% identical, at least 80% identical, at least 85% identical, at least 90% identical, or at least 95% identical, to a sense strand or antisense strand sequence of subset B. In some embodiments, the sense strand or antisense strand comprises a sequence of a sense or antisense strand of subset B, or a sequence thereof having 3 or 4 nucleoside substitutions, additions, or deletions. In some embodiments, the sense strand or antisense strand comprises a sequence of a sense or antisense strand of subset B, or a sequence thereof having 1 or 2 nucleoside substitutions, additions, or deletions. In some embodiments, the sense strand or antisense sequence comprises or consists of a sequence 100% identical to a sense strand or antisense strand sequence of subset B. The sense strand or antisense strand may comprise any modifications described herein. The sense strand or antisense strand may comprise a lipid moiety or a GalNAc moiety.

[0049] In some embodiments, the siRNA comprises a sense strand or antisense strand having a sequence in accordance with the sense strand or antisense strand sequence of an siRNA of subset C. In some embodiments, the sense strand or antisense strand comprises a sequence at least 75% identical, at least 80% identical, at least 85% identical, at least 90% identical, or at least 95% identical, to a sense strand or antisense strand sequence of subset C. In some embodiments, the sense strand or antisense strand comprises a sequence of a sense or antisense strand of subset C, or a sequence thereof having 3 or 4 nucleoside substitutions, additions, or deletions. In some embodiments, the sense strand or antisense strand comprises a sequence of a sense or antisense strand of subset C, or a sequence thereof having 1 or 2 nucleoside substitutions, additions, or deletions. In some embodiments, the sense strand or antisense sequence comprises or consists of a sequence 100% identical to a sense strand or antisense strand sequence of subset C. The sense strand or antisense strand may comprise any modifications described herein. The sense strand or antisense strand may comprise a lipid moiety or a GalNAc moiety.

[0050] In some embodiments, the siRNA comprises a sense strand or antisense strand having a sequence in accordance with the sense strand or antisense strand sequence of an siRNA of subset D. In some embodiments, the sense strand or antisense strand comprises a sequence at least 75% identical, at least 80% identical, at least 85% identical, at least 90% identical, or at least 95% identical, to a sense strand or antisense strand sequence of subset D. In some embodiments, the sense strand or antisense strand comprises a sequence of a sense or antisense strand of subset D, or a sequence thereof having 3 or 4 nucleoside substitutions, additions, or deletions. In some embodiments, the sense strand or antisense strand comprises a sequence of a sense or antisense strand of subset D, or a sequence thereof having 1 or 2 nucleoside substitutions, additions, or deletions. In some embodiments, the sense strand or antisense sequence comprises or consists of a sequence 100% identical to a sense strand or antisense strand sequence of subset D. The sense strand or antisense strand may comprise any modifications described herein. The sense strand or antisense strand may comprise a lipid moiety or a GalNAc moiety.

[0051] In some embodiments, the siRNA comprises a sense strand or antisense strand having a sequence in accordance with the sense strand or antisense strand sequence of an siRNA of subset E. In some embodiments, the sense strand or antisense strand comprises a sequence at least 75% identical, at least 80% identical, at least 85% identical, at least 90% identical, or at least 95% identical, to a sense strand or antisense strand sequence of subset E. In some embodiments, the sense strand or antisense strand comprises a sequence of a sense or antisense strand of subset E, or a sequence thereof having 3 or 4 nucleoside substitutions, additions, or deletions. In some embodiments, the sense strand or antisense strand comprises a sequence of a sense or antisense strand of subset E, or a sequence thereof having 1 or 2 nucleoside substitutions, additions, or deletions. In some embodiments, the sense strand or antisense sequence comprises or consists of a sequence 100% identical to a sense strand or antisense strand sequence of subset E. The sense strand or antisense strand may comprise any modifications described herein. The sense strand or antisense strand may comprise a lipid moiety or a GalNAc moiety.

[0052] In some embodiments, the siRNA comprises a sense strand or antisense strand having a sequence in accordance with the sense strand or antisense strand sequence of an siRNA of subset F. In some embodiments, the sense strand or antisense strand comprises a sequence at least 75% identical, at least 80% identical, at least 85% identical, at least 90% identical, or at least 95% identical, to a sense strand or antisense strand sequence of subset F. In some embodiments, the sense strand or antisense strand comprises a sequence of a sense or antisense strand of subset F, or a sequence thereof having 3 or 4 nucleoside substitutions, additions, or deletions. In some embodiments, the sense strand or antisense strand comprises a sequence of a sense or antisense strand of subset F, or a sequence thereof having 1 or 2 nucleoside substitutions, additions, or deletions. In some embodiments, the sense strand or antisense sequence comprises or consists of a sequence 100% identical to a sense strand or antisense strand sequence of subset F. The sense strand or antisense strand may comprise any modifications described herein. The sense strand or antisense strand may comprise a lipid moiety or a GalNAc moiety.

[0053] In some embodiments, the siRNA comprises a sense strand or antisense strand having a sequence in accordance with the sense strand or antisense strand sequence of an siRNA of subset G. In some embodiments, the sense strand or antisense strand comprises a sequence at least 75% identical, at least 80% identical, at least 85% identical, at least 90% identical, or at least 95% identical, to a sense strand or antisense strand sequence of subset G. In some embodiments, the sense strand or antisense strand comprises a sequence of a sense or antisense strand of subset G, or a sequence thereof having 3 or 4 nucleoside substitutions, additions, or deletions. In some embodiments, the sense strand or antisense strand comprises a sequence of a sense or antisense strand of subset G, or a sequence thereof having 1 or 2 nucleoside substitutions, additions, or deletions. In some embodiments, the sense strand or antisense sequence comprises or consists of a sequence 100% identical to a sense strand or antisense strand sequence of subset G. The sense strand or antisense strand may comprise any modifications described herein. The sense strand or antisense strand may comprise a lipid moiety or a GalNAc moiety.

[0054] In some embodiments, the siRNA comprises a sense strand or antisense strand having a sequence in accordance with the sense strand or antisense strand sequence of an siRNA of any table or sequence herein. In some embodiments, the sense strand or antisense strand comprises a sequence at least 75% identical, at least 80% identical, at least 85% identical, at least 90% identical, or at least 95% identical, to a sense strand or antisense strand sequence of any table or sequence herein. In some embodiments, the sense strand or antisense strand comprises a sequence of a sense or antisense strand of any table or sequence herein, or a sequence thereof having 3 or 4 nucleoside substitutions, additions, or deletions. In some embodiments, the sense strand or antisense strand comprises a sequence of a sense or antisense strand of any table or sequence herein, or a sequence thereof having 1 or 2 nucleoside substitutions, additions, or deletions. In some embodiments, the sense strand or antisense sequence comprises or consists of a sequence 100% identical to a sense strand or antisense strand sequence of any table or sequence herein. The sense strand or antisense strand may comprise an overhang. The sense strand or antisense strand may comprise any modifications described herein. The sense strand or antisense strand may comprise a lipid moiety or a GalNAc moiety.

[0055] In some embodiments, the siRNA comprises a sense strand or antisense strand having a sequence in accordance with the sense strand or antisense strand sequence of an siRNA of any one of Tables 6-11. In some embodiments, the sense strand or antisense strand comprises a sequence at least 75% identical, at least 80% identical, at least 85% identical, at least 90% identical, or at least 95% identical, to a sense strand or antisense strand sequence of any one of Tables 6-11. In some embodiments, the sense strand or antisense strand comprises a sequence of a sense or antisense strand of any one of Tables 6-11, or a sequence thereof having 3 or 4 nucleoside substitutions, additions, or deletions. In some embodiments, the sense strand or antisense strand comprises a sequence of a sense or antisense strand of any one of Tables 6-11, or a sequence thereof having 1 or 2 nucleoside substitutions, additions, or deletions. In some embodiments, the sense strand or antisense sequence comprises or consists of a sequence 100% identical to a sense strand or antisense strand sequence of any one of Tables 6-11. The sense strand or antisense strand may comprise an overhang. The sense strand or antisense strand may comprise any modifications described herein. The sense strand or antisense strand may comprise a lipid moiety or a GalNAc moiety.

[0056] In some embodiments, the siRNA comprises a sense strand or antisense strand having a sequence in accordance with the sense strand or antisense strand sequence of an siRNA of Table 13B. In some embodiments, the sense strand or antisense strand comprises a sequence at least 75% identical, at least 80% identical, at least 85% identical, at least 90% identical, or at least 95% identical, to a sense strand or antisense strand sequence of Table 13B. In some embodiments, the sense strand or antisense strand comprises a sequence of a sense or antisense strand of Table 13B, or a sequence thereof having 3 or 4 nucleoside substitutions, additions, or deletions. In some embodiments, the sense strand or antisense strand comprises a sequence of a sense or antisense strand of Table 13B, or a sequence thereof having 1 or 2 nucleoside substitutions, additions, or deletions. In some embodiments, the sense strand or antisense sequence comprises or consists of a sequence 100% identical to a sense strand or antisense strand sequence of Table 13B. The sense strand or antisense strand may comprise an overhang. The sense strand or antisense strand may comprise any modifications described herein. The sense strand or antisense strand may comprise a lipid moiety or a GalNAc moiety.

[0057] In some embodiments, the siRNA comprises a sense strand or antisense strand having a sequence in accordance with the sense strand or antisense strand sequence of an siRNA of Table 17. In some embodiments, the sense strand or antisense strand comprises a sequence at least 75% identical, at least 80% identical, at least 85% identical, at least 90% identical, or at least 95% identical, to a sense strand or antisense strand sequence of Table 17. In some embodiments, the sense strand or antisense strand comprises a sequence of a sense or antisense strand of Table 17, or a sequence thereof having 3 or 4 nucleoside substitutions, additions, or deletions. In some embodiments, the sense strand or antisense strand comprises a sequence of a sense or antisense strand of Table 17, or a sequence thereof having 1 or 2 nucleoside substitutions, additions, or deletions. In some embodiments, the sense strand or antisense sequence comprises or consists of a sequence 100% identical to a sense strand or antisense strand sequence of Table 17. The sense strand or antisense strand may comprise an overhang. The sense strand or antisense strand may comprise any modifications described herein. The sense strand or antisense strand may comprise a lipid moiety or a GalNAc moiety.

[0058] In some embodiments, the siRNA comprises a sense strand having a sequence in accordance with any of SEQ ID NOs: 5053-5054, 5058, 5063, 27, 272, 479, 485, 5069, 5070, 5074, and 5079. In some embodiments, the sense strand sequence comprises or consists of sequence at least 75% identical to any one of SEQ ID NOs: 5053-5054, 5058, 5063, 27, 272, 479, 485, 5069, 5070, 5074, and 5079, at least 80% identical to any one of SEQ ID NOs: 5053-5054, 5058, 5063, 27, 272, 479, 485, 5069, 5070, 5074, and 5079, at least 85% identical to of any one of SEQ ID NOs: 5053-5054, 5058, 5063, 27, 272, 479, 485, 5069, 5070, 5074, and 5079, at least 90% identical to any one of SEQ ID NOs: 5053-5054, 5058, 5063, 27, 272, 479, 485, 5069, 5070, 5074, and 5079, or at least 95% identical to any one of SEQ ID NOs: 5053-5054, 5058, 5063, 27, 272, 479, 485, 5069, 5070, 5074, and 5079. In some embodiments, the sense strand sequence comprises or consists of the sequence of any one of SEQ ID NOs: 5053-5054, 5058, 5063, 27, 272, 479, 485, 5069, 5070, 5074, and 5079, or a sense strand sequence thereof having 1, 2, 3, or 4 nucleoside substitutions, additions, or deletions. In some embodiments, the sense strand sequence comprises or consists of the sequence of any one of SEQ ID NOs: 5053-5054, 5058, 5063, 27, 272, 479, 485, 5069, 5070, 5074, and 5079, or a sense strand sequence thereof having 1 or 2 nucleoside substitutions, additions, or deletions. In some embodiments, the sense strand sequence comprises or consists of a sequence 100% identical to SEQ ID NOs: 5053-5054, 5058, 5063, 27, 272, 479, 485, 5069, 5070, 5074, and 5079. The sense strand sequence may include the first 5, 6, 7, 8, 9, 10, 11, 12, 13, 14, 15, 16, 17, 18, or 19 nucleotides (in the 5′ to 3′ direction) of any of the aforementioned sequences. The sense strand sequence may include the last 5, 6, 7, 8, 9, 10, 11, 12, 13, 14, 15, 16, 17, 18, or 19 nucleotides (in the 5′ to 3′ direction) of any of the aforementioned sequences. The sense strand may comprise a modification pattern described herein. The sense strand may comprise an overhang. The sense strand may comprise a lipid moiety. The sense strand may comprise a GalNAc moiety.

[0059] In some embodiments, the siRNA comprises an antisense strand having a sequence in accordance with any of SEQ ID NOs: 5085, 5086, 5090, 5095, 2474, 2719, 2926, 2932, 5101, 5102, 5106, or 5111. In some embodiments, the antisense strand sequence comprises or consists of sequence at least 75% identical to any one of SEQ ID NOs: 5085, 5086, 5090, 5095, 2474, 2719, 2926, 2932, 5101, 5102, 5106, or 5111, at least 80% identical to any one of SEQ ID NOs: 5085, 5086, 5090, 5095, 2474, 2719, 2926, 2932, 5101, 5102, 5106, or 5111, at least 85% identical to of any one of SEQ ID NOs: 5085, 5086, 5090, 5095, 2474, 2719, 2926, 2932, 5101, 5102, 5106, or 5111, at least 90% identical to any one of SEQ ID NOs: 5085, 5086, 5090, 5095, 2474, 2719, 2926, 2932, 5101, 5102, 5106, or 5111, or at least 95% identical to any one of SEQ ID NOs: 5085, 5086, 5090, 5095, 2474, 2719, 2926, 2932, 5101, 5102, 5106, or 5111. In some embodiments, the antisense strand sequence comprises or consists of the sequence of any one of SEQ ID NOs: 5085, 5086, 5090, 5095, 2474, 2719, 2926, 2932, 5101, 5102, 5106, or 5111, or an antisense strand sequence thereof having 1, 2, 3, or 4 nucleoside substitutions, additions, or deletions. In some embodiments, the antisense strand sequence comprises or consists of the sequence of any one of SEQ ID NOs: 5085, 5086, 5090, 5095, 2474, 2719, 2926, 2932, 5101, 5102, 5106, or 5111, or an antisense strand sequence thereof having 1 or 2 nucleoside substitutions, additions, or deletions. In some embodiments, the antisense strand sequence comprises or consists of a sequence 100% identical to SEQ ID NOs: 5085, 5086, 5090, 5095, 2474, 2719, 2926, 2932, 5101, 5102, 5106, or 5111. The antisense strand sequence may include the first 5, 6, 7, 8, 9, 10, 11, 12, 13, 14, 15, 16, 17, 18, or 19 nucleotides (in the 5′ to 3′ direction) of any of the aforementioned sequences. The antisense strand sequence may include the last 5, 6, 7, 8, 9, 10, 11, 12, 13, 14, 15, 16, 17, 18, or 19 nucleotides (in the 5′ to 3′ direction) of any of the aforementioned sequences. The antisense strand may comprise an overhang. The antisense strand may comprise a modification pattern described herein. The antisense strand may comprise a lipid moiety or a GalNAc moiety.

### C. ASOs

[0060] In some embodiments, the composition comprises an oligonucleotide that inhibits the expression of MS4A4E, wherein the oligonucleotide comprises an antisense oligonucleotide (ASO). In some embodiments, the ASO is 12-30 nucleosides in length. In some embodiments, the ASO is 14-30 nucleosides in length. In some embodiments, the ASO is at least about 10, 11, 12, 13, 14, 15, 16, 17, 18, 19, 20, 21, 22, 23, 24, 25, 26, 27, 28, 29, or 30 nucleosides in length, or a range defined by any of the two aforementioned numbers. In some embodiments, the ASO is 15-25 nucleosides in length. In some embodiments, the ASO is 20 nucleosides in length.

[0061] In some embodiments, the composition comprises an oligonucleotide that inhibits the expression of MS4A4E, wherein the oligonucleotide comprises an ASO about 12-30 nucleosides in length and comprising a nucleoside sequence complementary to about 12-30 contiguous nucleosides of a full-length human MS4A4E mRNA sequence such as SEQ ID NO: 5117; wherein (i) the oligonucleotide comprises a modification comprising a modified nucleoside and/or a modified internucleoside linkage, and/or (ii) the composition comprises a pharmaceutically acceptable carrier. In some embodiments, the ASO comprise a nucleoside sequence complementary to at least about 10, 11, 12, 13, 14, 15, 16, 17, 18, 19, 20, 21, 22, 23, 24, 25, 26, 27, 28, 29, 30, or more contiguous nucleosides of one of SEQ ID NO: 5117.

### D. Modifications

[0062] In some embodiments, the composition comprises an oligonucleotide that inhibits the expression of MS4A4E, wherein the oligonucleotide comprises a modification comprising a modified nucleoside and/or a modified internucleoside linkage, and/or (ii) the composition comprises a pharmaceutically acceptable carrier. In some embodiments, the oligonucleotide comprises a modification comprising a modified nucleoside and/or a modified internucleoside linkage. In some embodiments, the oligonucleotide comprises a modified internucleoside linkage. In some embodiments, the modified internucleoside linkage comprises alkylphosphonate, phosphorothioate, methylphosphonate, phosphorodithioate, alkylphosphonothioate, phosphoramidate, carbamate, carbonate, phosphate triester, acetamidate, or carboxymethyl ester, or a combination thereof. In some embodiments, the modified internucleoside linkage comprises one or more phosphorothioate linkages. Modified internucleoside linkages may be included in siRNAs or ASOs. Benefits of the modified internucleoside linkage may include decreased toxicity or improved pharmacokinetics.

[0063] The oligonucleotide may include one or more phosphorothioates. A phosphorothioate may include a nonbridging oxygen atom in a phosphate backbone of the oligonucleotide that is replaced by sulfur. Inclusion of phosphorothioates may enhance uptake into a cell such as a Kupffer cell. Thus, an oligonucleotide that includes one or more phosphorothioates may be targeted to cells such as Kupffer cells in a subject's liver, upon administration of the oligonucleotide.

[0064] In some embodiments, the composition comprises an oligonucleotide that inhibits the expression of MS4A4E, wherein the oligonucleotide comprises a modified internucleoside linkage, wherein the oligonucleotide comprises 1, 2, 3, 4, 5, 6, 7, 8, 9, 10, 11, 12, 13, 14, 15, 16, 17, 18, 19, or 20 modified internucleoside linkages, or a range of modified internucleoside linkages defined by any two of the aforementioned numbers. In some embodiments, the oligonucleotide comprises no more than 18 modified internucleoside linkages. In some embodiments, the oligonucleotide comprises no more than 20 modified internucleoside linkages. In some embodiments, the oligonucleotide comprises 2 or more modified internucleoside linkages, 3 or more modified internucleoside linkages, 4 or more modified internucleoside linkages, 5 or more modified internucleoside linkages, 6 or more modified internucleoside linkages, 7 or more modified internucleoside linkages, 8 or more modified internucleoside linkages, 9 or more modified internucleoside linkages, 10 or more modified internucleoside linkages, 11 or more modified internucleoside linkages, 12 or more modified internucleoside linkages, 13 or more modified internucleoside linkages, 14 or more modified internucleoside linkages, 15 or more modified internucleoside linkages, 16 or more modified internucleoside linkages, 17 or more modified internucleoside linkages, 18 or more modified internucleoside linkages, 19 or more modified internucleoside linkages, or 20 or more modified internucleoside linkages.

[0065] In some embodiments, the composition comprises an oligonucleotide that inhibits the expression of MS4A4E, wherein the oligonucleotide comprises the modified nucleoside. In some embodiments, the modified nucleoside comprises a locked nucleic acid (LNA), hexitol nucleic acid (HLA), cyclohexene nucleic acid (CeNA), 2′-methoxyethyl, 2′-O-alkyl, 2′-O-allyl, 2′-fluoro, or 2′-deoxy, or a combination thereof. In some embodiments, the modified nucleoside comprises a LNA. In some embodiments, the modified nucleoside comprises a 2′,4′ constrained ethyl nucleic acid. In some embodiments, the modified nucleoside comprises HLA. In some embodiments, the modified nucleoside comprises CeNA. In some embodiments, the modified nucleoside comprises a 2′-methoxyethyl group. In some embodiments, the modified nucleoside comprises a 2′-O-alkyl group. In some embodiments, the modified nucleoside comprises a 2′-O-allyl group. In some embodiments, the modified nucleoside comprises a 2′-fluoro group. In some embodiments, the modified nucleoside comprises a 2′-deoxy group. In some embodiments, the modified nucleoside comprises a 2-O-methyl nucleoside, 2′-deoxyfluoro nucleoside, 2′-O—N-methylacetamido (2′-O-NMA) nucleoside, a 2′-O-dimethylaminoethoxyethyl (2′-O-DMAEOE) nucleoside, 2′-O-aminopropyl (2′-O-AP) nucleoside, or 2′-ara-F, or a combination thereof. In some embodiments, the modified nucleoside comprises a 2′-O-methyl nucleoside. In some embodiments, the modified nucleoside comprises a 2′-deoxyfluoro nucleoside. In some embodiments, the modified nucleoside comprises a 2′-O-NMA nucleoside. In some embodiments, the modified nucleoside comprises a 2′-O-DMAEOE nucleoside. In some embodiments, the modified nucleoside comprises a 2′-O-aminopropyl (2′-O-AP) nucleoside. In some embodiments, the modified nucleoside comprises 2′-ara-F. In some embodiments, the modified nucleoside comprises one or more 2′fluoro modified nucleosides. In some embodiments, the modified nucleoside comprises a 2′ O-alkyl modified nucleoside. Benefits of the modified nucleoside may include decreased toxicity or improved pharmacokinetics.

[0066] In some embodiments, the oligonucleotide comprises 1, 2, 3, 4, 5, 6, 7, 8, 9, 10, 11, 12, 13, 14, 15, 16, 17, 18, 19, 20, or 21 modified nucleosides, or a range of nucleosides defined by any two of the aforementioned numbers. In some embodiments, the oligonucleotide comprises no more than 19 modified nucleosides. In some embodiments, the oligonucleotide comprises no more than 21 modified nucleosides. In some embodiments, the oligonucleotide comprises 2 or more modified nucleosides, 3 or more modified nucleosides, 4 or more modified nucleosides, 5 or more modified nucleosides, 6 or more modified nucleosides, 7 or more modified nucleosides, 8 or more modified nucleosides, 9 or more modified nucleosides, 10 or more modified nucleosides, 11 or more modified nucleosides, 12 or more modified nucleosides, 13 or more modified nucleosides, 14 or more modified nucleosides, 15 or more modified nucleosides, 16 or more modified nucleosides, 17 or more modified nucleosides, 18 or more modified nucleosides, 19 or more modified nucleosides, 20 or more modified nucleosides, or 21 or more modified nucleosides.

[0067] In some embodiments, the composition comprises an oligonucleotide that inhibits the expression of MS4A4E, wherein the oligonucleotide comprises a moiety attached at a 3′ or 5′ terminus of the oligonucleotide. Examples of moieties include a hydrophobic moiety or a sugar moiety, or a combination thereof. In some embodiments, the oligonucleotide is an siRNA having a sense strand, and the moiety is attached to a 5′ end of the sense strand. In some embodiments, the oligonucleotide is an siRNA having a sense strand, and the moiety is attached to a 3′ end of the sense strand. In some embodiments, the oligonucleotide is an siRNA having an antisense strand, and the moiety is attached to a 5′ end of the antisense strand. In some embodiments, the oligonucleotide is an siRNA having an antisense strand, and the moiety is attached to a 3′ end of the antisense strand. In some embodiments, the oligonucleotide is an ASO, and the moiety is attached to a 5′ end of the ASO. In some embodiments, the oligonucleotide is an ASO, and the moiety is attached to a 3′ end of the ASO. The oligonucleotide may include purines. Examples of purines include adenine (A) or guanine (G), or modified versions thereof. The oligonucleotide may include pyrimidines. Examples of pyrimidines include cytosine (C), thymine (T), or uracil (U), or modified versions thereof.

[0068] In some embodiments, purines of the oligonucleotide comprise 2′ fluoro modified purines. In some embodiments, purines of the oligonucleotide comprise 2′ methyl modified purines. In some embodiments, purines of the oligonucleotide comprise a mixture of 2′ fluoro and 2′ methyl modified purines. In some embodiments, all purines of the oligonucleotide comprise 2′ fluoro modified purines. In some embodiments, all purines of the oligonucleotide comprise 2′ methyl modified purines. In some embodiments, all purines of the oligonucleotide comprise a mixture of 2′ fluoro and 2′ methyl modified purines.

[0069] In some embodiments, pyrimidines of the oligonucleotide comprise 2′ fluoro modified pyrimidines. In some embodiments, pyrimidines of the oligonucleotide comprise 2′ methyl modified pyrimidines. In some embodiments, pyrimidines of the oligonucleotide comprise a mixture of 2′ fluoro and 2′ methyl modified pyrimidines. In some embodiments, all pyrimidines of the oligonucleotide comprise 2′ fluoro modified pyrimidines. In some embodiments, all pyrimidines of the oligonucleotide comprise 2′ methyl modified pyrimidines. In some embodiments, all pyrimidines of the oligonucleotide comprise a mixture of 2′ fluoro and 2′ methyl modified pyrimidines.

[0070] In some embodiments, purines of the oligonucleotide comprise 2′ fluoro modified purines, and pyrimidines of the oligonucleotide comprise a mixture of 2′ fluoro and 2′ methyl modified pyrimidines. In some embodiments, purines of the oligonucleotide comprise 2′ methyl modified purines, and pyrimidines of the oligonucleotide comprise a mixture of 2′ fluoro and 2′ methyl modified pyrimidines. In some embodiments, purines of the oligonucleotide comprise 2′ fluoro modified purines, and pyrimidines of the oligonucleotide comprise 2′ methyl modified pyrimidines. In some embodiments, purines of the oligonucleotide comprise 2′ methyl modified purines, and pyrimidines of the oligonucleotide comprise 2′ fluoro modified pyrimidines. In some embodiments, pyrimidines of the oligonucleotide comprise 2′ fluoro modified pyrimidines, and purines of the oligonucleotide comprise a mixture of 2′ fluoro and 2′ methyl modified purines. In some embodiments, pyrimidines of the oligonucleotide comprise 2′ methyl modified pyrimidines, and purines of the oligonucleotide comprise a mixture of 2′ fluoro and 2′ methyl modified purines. In some embodiments, pyrimidines of the oligonucleotide comprise 2′ fluoro modified pyrimidines, and purines of the oligonucleotide comprise 2′ methyl modified purines. In some embodiments, pyrimidines of the oligonucleotide comprise 2′ methyl modified pyrimidines, and purines of the oligonucleotide comprise 2′ fluoro modified purines.

[0071] In some embodiments, all purines of the oligonucleotide comprise 2′ fluoro modified purines, and all pyrimidines of the oligonucleotide comprise a mixture of 2′ fluoro and 2′ methyl modified pyrimidines. In some embodiments, all purines of the oligonucleotide comprise 2′ methyl modified purines, and all pyrimidines of the oligonucleotide comprise a mixture of 2′ fluoro and 2′ methyl modified pyrimidines. In some embodiments, all purines of the oligonucleotide comprise 2′ fluoro modified purines, and all pyrimidines of the oligonucleotide comprise 2′ methyl modified pyrimidines. In some embodiments, all purines of the oligonucleotide comprise 2′ methyl modified purines, and all pyrimidines of the oligonucleotide comprise 2′ fluoro modified pyrimidines. In some embodiments, all pyrimidines of the oligonucleotide comprise 2′ fluoro modified pyrimidines, and all purines of the oligonucleotide comprise a mixture of 2′ fluoro and 2′ methyl modified purines. In some embodiments, all pyrimidines of the oligonucleotide comprise 2′ methyl modified pyrimidines, and all purines of the oligonucleotide comprise a mixture of 2′ fluoro and 2′ methyl modified purines. In some embodiments, all pyrimidines of the oligonucleotide comprise 2′ fluoro modified pyrimidines, and all purines of the oligonucleotide comprise 2′ methyl modified purines. In some embodiments, all pyrimidines of the oligonucleotide comprise 2′ methyl modified pyrimidines, and all purines of the oligonucleotide comprise 2′ fluoro modified purines.

[0072] In some embodiments, position nine of the sense strand comprises a 2′ fluoro-modified pyrimidine. In some embodiments, all purines of the sense strand comprise 2′-O-methyl modified purines. In some embodiments, 1, 2, 3, 4, or 5 pyrimidines between positions 5 and 11 comprise a 2′flouro-modified pyrimidine, provided there are not three 2′ fluoro-modified pyrimidines in a row. In some embodiments, the odd-numbered positions of the antisense strand comprise 2′-O-methyl modified nucleotides. In some embodiments, the even-numbered positions of the antisense strand comprise 2′flouro-modified nucleotides and unmodified deoxyribonucleotide. In some embodiments, the even-numbered positions of the antisense strand comprise 2′flouro-modified nucleotides, 2′-O-methyl modified nucleotides and unmodified deoxyribonucleotide. In some embodiments, position nine of the sense strand comprises a 2′ fluoro-modified pyrimidine; all purines of the sense strand comprises 2′-O-methyl modified purines; 1, 2, 3, 4, or 5 pyrimidines between positions 5 and 11 comprise a 2′flouro-modified pyrimidine, provided there are not three 2′ fluoro-modified pyrimidines in a row; the odd-numbered positions of the antisense strand comprise 2′-O-methyl modified nucleotides; and the even-numbered positions of the antisense strand comprise 2′flouro-modified nucleotides and unmodified deoxyribonucleotides.

[0073] In some embodiments, position nine of the sense strand comprises a 2′ fluoro-modified purine. In some embodiments, all pyrimidines of the sense strand comprise 2′-O-methyl modified purines. In some embodiments, 1, 2, 3, 4, or 5 purines between positions 5 and 11 comprise a 2′flouro-modified purine, provided there are not three 2′ fluoro-modified purine in a row. In some embodiments, the odd-numbered positions of the antisense strand comprise 2′-O-methyl modified nucleotides. In some embodiments, the even-numbered positions of the antisense strand comprise 2′flouro-modified nucleotides, 2′-O-methyl modified nucleotides and unmodified deoxyribonucleotide. In some embodiments, the even-numbered positions of the antisense strand comprise 2′flouro-modified nucleotides and unmodified deoxyribonucleotide. In some embodiments, position nine of the sense strand comprises a 2′ fluoro-modified purine; all pyrimidine of the sense strand comprises 2′-O-methyl modified pyrimidines; 1, 2, 3, 4, or 5 purines between positions 5 and 11 comprise a 2′flouro-modified purines, provided there are not three 2′ fluoro-modified purines in a row; the odd-numbered positions of the antisense strand comprise 2′-O-methyl modified nucleotides; and the even-numbered positions of the antisense strand comprise 2′flouro-modified nucleotides and unmodified deoxyribonucleotides. In some embodiments, there are not three 2′ fluoro-modified purines in a row. In some embodiments, there are not three 2′ fluoro-modified pyrimidines in a row.

[0074] In some embodiments, position nine of the sense strand comprises an unmodified deoxyribonucleotide. In some embodiments, positions 5, 7, and 8 of the sense strand comprise 2′fluoro-modified nucleotides. In some embodiments, all pyrimidines in positions 10 to 21 of the sense strand comprise 2′-O-methyl modified pyrimidines and all purines in positions 10 to 21 of the comprise 2′-O-methyl modified purines or 2′fluoro-modified purines. In some embodiments, the odd-numbered positions of the antisense strand comprise 2′-O-methyl modified nucleotides. In some embodiments, the even-numbered positions of the antisense strand comprise 2′flouro-modified nucleotides and unmodified deoxyribonucleotides. In some embodiments, the even-numbered positions of the antisense strand comprise 2′flouro-modified nucleotides, 2′-O-methyl modified nucleotides and unmodified deoxyribonucleotides. In some embodiments, position nine of the sense strand comprises an unmodified deoxyribonucleotide; positions 5, 7, and 8 of the sense strand comprise 2′fluoro-modifed nucleotides; all pyrimidines in positions 10 to 21 of the sense strand comprise 2′-O-methyl modified pyrimidines and all purines in positions 10 to 21 of the comprise 2′-O-methyl modified purines or 2′fluoro-modified purines; the odd-numbered positions of the antisense strand comprise 2′-O-methyl modified nucleotides; and the even-numbered positions of the antisense strand comprise 2′flouro-modified nucleotides and unmodified deoxyribonucleotides.

[0075] In some embodiments, position nine of the sense strand comprises an unmodified deoxyribonucleotide. In some embodiments, positions 5, 7, and 8 of the sense strand comprise 2′fluoro-modified nucleotides. In some embodiments, all pyrimidines in positions 10 to 21 of the sense strand comprise 2′-O-methyl modified pyrimidines and all purines in positions 10 to 21 of the comprise 2′-O-methyl modified purines or 2′fluoro-modified purines. In some embodiments, the odd-numbered positions of the antisense strand comprise 2′-O-methyl modified nucleotides. In some embodiments, the even-numbered positions of the antisense strand comprise 2′flouro-modified nucleotides and unmodified deoxyribonucleotides. In some embodiments, the even-numbered positions of the antisense strand comprise 2′flouro-modified nucleotides, 2′-O-methyl modified nucleotides and unmodified deoxyribonucleotides. In some embodiments, position nine of the sense strand comprises an unmodified deoxyribonucleotide; positions 5, 7, and 8 of the sense strand comprise 2′fluoro-modified nucleotides; all pyrimidines in positions 10 to 21 of the sense strand comprise 2′-O-methyl modified pyrimidines and all purines in positions 10 to 21 of the comprise 2′-O-methyl modified purines or 2′fluoro-modified purines; the odd-numbered positions of the antisense strand comprise 2′-O-methyl modified nucleotides; and the even-numbered positions of the antisense strand comprise 2′flouro-modified nucleotides and unmodified deoxyribonucleotides. In some embodiments, the oligonucleotide includes a negatively charged group. The negatively charged group may aid in cell or tissue penetration. The negatively charged group may be attached at a 5′ or 3′ end (e.g. a 5′ end) of the oligonucleotide. This may be referred to as an end group. The end group may be or include a phosphorothioate, phosphorodithioate, vinylphosphonate, methylphosphonate, cyclopropyl phosphonate, or a deoxy-C-malonyl. The end group may include an extra 5′ phosphate such as an extra 5′ phosphate. A combination of end groups may be used.

[0076] In some embodiments, the moiety includes a negatively charged group attached at a 5′ end of the oligonucleotide. This may be referred to as a 5′-end group. In some embodiments, the negatively charged group is attached at a 5′ end of an antisense strand of an siRNA disclosed herein. The 5′-end group may be or include a 5′-end phosphorothioate, 5′-end phosphorodithioate, 5′-end vinylphosphonate (5′-VP), 5′-end methylphosphonate, 5′-end cyclopropyl phosphonate, or a 5′-deoxy-5′-C-malonyl. The 5′-end group may comprise 5′-VP. In some embodiments, the 5′-VP comprises a trans-vinylphosphate or cis-vinylphosphate. The 5′-end group may include an extra 5′ phosphate. A combination of 5′-end groups may be used.

[0077] In some embodiments, the oligonucleotide includes a negatively charged group. The negatively charged group may aid in cell or tissue penetration. The negatively charged group may be attached at a 5′ or 3′ end (e.g. a 5′ end) of the oligonucleotide. This may be referred to as an end group. The end group may be or include a phosphorothioate, phosphorodithioate, vinylphosphonate, methylphosphonate, cyclopropyl phosphonate, or a deoxy-C-malonyl. The end group may include an extra 5′ phosphate such as an extra 5′ phosphate. A combination of end groups may be used.

[0078] In some embodiments, the oligonucleotide includes a phosphate mimic. In some embodiments, the phosphate mimic comprises vinyl phosphonate. In some embodiments, the vinyl phosphonate comprises a trans-vinylphosphate. In some embodiments, the vinyl phosphonate comprises a cis-vinylphosphate. An example of a nucleotide that includes a vinyl phosphonate is shown below

[chemical structure]

5′ vinylphosphonate 2′ O Methyl Uridine

[0079] In some embodiments, the vinyl phosphonate increases the stability of the oligonucleotide. In some embodiments, the vinyl phosphonate increases the accumulation of the oligonucleotide in tissues. In some embodiments, the vinyl phosphonate protects the oligonucleotide from an exonuclease or a phosphatase. In some embodiments, the vinyl phosphonate improves the binding affinity of the oligonucleotide with the siRNA processing machinery.

[0080] In some embodiments, the oligonucleotide includes 1 vinyl phosphonate. In some embodiments, the oligonucleotide includes 2 vinyl phosphonates. In some embodiments, the oligonucleotide includes 3 vinyl phosphonates. In some embodiments, the oligonucleotide includes 4 vinyl phosphonates. In some embodiments, the antisense strand of the oligonucleotide comprises a vinyl phosphonate at the 5′ end. In some embodiments, the antisense strand of the oligonucleotide comprises a vinyl phosphonate at the 3′ end. In some embodiments, the sense strand of the oligonucleotide comprises a vinyl phosphonate at the 5′ end. In some embodiments, the sense strand of the oligonucleotide comprises a vinyl phosphonate at the 3′ end.

### 1. Hydrophobic Moieties

[0081] In some embodiments, the composition comprises an oligonucleotide that inhibits the expression of MS4A4E, wherein the oligonucleotide comprises a hydrophobic moiety. The hydrophobic moiety may be attached at a 3′ or 5′ terminus of the oligonucleotide via phosphate or phosphorothioate linkage. The hydrophobic moiety may include a lipid such as a fatty acid. The hydrophobic moiety may include a hydrocarbon. The hydrocarbon may be linear. The hydrocarbon may be non-linear. Inclusion of a hydrophobic moiety may be useful for cell targeting such as Kupffer cell targeting. The hydrophobic moiety may include a lipid moiety or a cholesterol moiety, or a combination thereof.

[0082] In some embodiments, the composition comprises an oligonucleotide that inhibits the expression of MS4A4E, wherein the oligonucleotide comprises a lipid attached at a 3′ or 5′ terminus of the oligonucleotide. In some embodiments, the lipid comprises cholesterol, myristoyl, palmitoyl, stearoyl, lithocholoyl, docosanoyl, docosahexaenoyl, myristyl, palmityl stearyl, or α-tocopherol, or a combination thereof.

[0083] In some embodiments, the composition comprises an oligonucleotide that inhibits the expression of MS4A4E, wherein the oligonucleotide comprises a hydrophobic ligand or moiety. In some embodiments, the hydrophobic ligand or moiety comprises cholesterol. In some embodiments, the hydrophobic ligand or moiety comprises a cholesterol derivative. In some embodiments, the hydrophobic ligand or moiety is attached at a 3′ terminus of the oligonucleotide. In some embodiments, the hydrophobic ligand or moiety s attached at a 5′ terminus of the oligonucleotide. In some embodiments, the composition comprises a sense strand, and the hydrophobic ligand or moiety is attached to the sense strand (e.g. attached to a 5′ end of the sense strand, or attached to a 3′ end of the sense strand). In some embodiments, the composition comprises an antisense strand, and the hydrophobic ligand or moiety is attached to the antisense strand (e.g. attached to a 5′ end of the antisense strand, or attached to a 3′ end of the antisense strand). In some embodiments, the composition comprises a hydrophobic ligand or moiety attached at a 3′ or 5′ terminus of the oligonucleotide.

[0084] In some embodiments, a hydrophobic moiety is attached to the oligonucleotide (e.g. a sense strand and/or an antisense strand of a siRNA). In some embodiments, a hydrophobic moiety is attached at a 3′ terminus of the oligonucleotide. In some embodiments, a hydrophobic moiety is attached at a 5′ terminus of the oligonucleotide. In some embodiments, the hydrophobic moiety comprises cholesterol. In some embodiments, the hydrophobic moiety includes a cyclohexanyl.

[0085] In some embodiments, the composition comprises an oligonucleotide that inhibits the expression of SOS, wherein the oligonucleotide comprises a lipid attached at a 3′ or 5′ terminus of the oligonucleotide. In some embodiments, a lipid is attached at a 3′ terminus of the oligonucleotide. In some embodiments, a lipid is attached at a 5′ terminus of the oligonucleotide. In some embodiments, the lipid comprises cholesterol, myristoyl, palmitoyl, stearoyl, lithocholoyl, docosanoyl, docosahexaenoyl, myristyl, palmityl stearyl, or α-tocopherol, or a combination thereof. In some embodiments, the lipid comprises stearyl, lithocholyl, docosanyl, docosahexaenyl, or myristyl. In some embodiments, the lipid comprises cholesterol. In some embodiments, the lipid includes a sterol such as cholesterol. In some embodiments, the lipid comprises stearyl, t-butylphenol, n-butylphenol, octylphenol, dodecylphenol, phenyl n-dodecyl, octadecylbenzamide, hexadecylbenzamide, or octadecylcyclohexyl. In some embodiments, the lipid comprises phenyl para C12.

[0086] In some embodiments, the oligonucleotide comprises any aspect of the following structure:

[chemical structure]

[0087] In some embodiments the oligonucleotide comprises any aspect of the following structure:

[chemical structure]

[0088] In some embodiments, the oligonucleotide comprises any aspect of the following structure:

[chemical structure]

[0089] The aspect included in the oligonucleotide may include the entire structure, or may include the lipid moiety, of any of the structures shown. In some embodiments, n is 1-3. In some embodiments, n is 1. In some embodiments, n is 2. In some embodiments, n is 3. In some embodiments, R is an alkyl group. In some embodiments, the alkyl group contains 1, 2, 3, 4, 5, 6, 7, 8, 9, 10, 11, 12, 13, 14, 15, 16, 17, 18, 19, or 20 carbons. In some embodiments, the alkyl group contains 4, 5, 6, 7, 8, 9, 10, 11, 12, 13, 14, 15, 16, 17, or 18 carbons, or a range defined by any two of the aforementioned numbers of carbons. In some embodiments, the alkyl group contains 4-18 carbons. In some embodiments, the lipid moiety comprises an alcohol or ether.

[0090] In some embodiments, the lipid includes a fatty acid. In some embodiments, the lipid comprises a lipid depicted in Table 2. The example lipid moieties in Table 2 are shown attached at a 5′ end of an oligonucleotide, in which the 5′ terminal phosphate of the oligonucleotide is shown with the lipid moiety. In some embodiments, a lipid moiety in Table 2 may be attached at a different point of attachment than shown. For example, the point of attachment of any of the lipid moieties in the table may be at a 3′ oligonucleotide end. In some embodiments, the lipid is used for targeting the oligonucleotide to a non-hepatic cell or tissue.

TABLE 2
Hydrophobic moiety examples

| Hydrophobic | | |
|---|---|---|
| Moiety | Hydrophobic | |
| Description | Moiety Name | Example Conjugation |
| stearyl | ETL3 | [chemical structure] |
| t-butylphenyl | ETL7 | [chemical structure] |
| n-butylphenyl | ETL8 | [chemical structure] |
| octylphenyl | ETL9 | [chemical structure] |
| dodecylphenyl | ETL10 | [chemical structure] |
| phenyl n-dodecyl | ETL 12 | [chemical structure] |
| octadecylbenzamide | ETL13 | [chemical structure] |
| hexadecylbenzamide | ETL15 | [chemical structure] |
| octadecylcyclohexyl | ETL16 | [chemical structure] |
| myristamido methylphenyl | ETL 18 | [chemical structure] |
| lauramido methylphenyl | ETL 19 | [chemical structure] |
| phenethyl- palmityl | ETL20 | [chemical structure] |

[0091] In some embodiments, the lipid or lipid moiety includes 16 to 18 carbons. In some embodiments, the lipid includes 16 carbons. In some embodiments, the lipid includes 17 carbons. In some embodiments, the lipid includes 18 carbons. In some embodiments, the lipid moiety includes 16 carbons. In some embodiments, the lipid moiety includes 17 carbons. In some embodiments, the lipid moiety includes 18 carbons.

[0092] The hydrophobic moiety may include a linker that comprises a carbocycle. The carbocycle may be six-membered. Some examples of a carbocycle include phenyl or cyclohexyl. The linker may include a phenyl. The linker may include a cyclohexyl. The lipid may be attached to the carbocycle, which may in turn be attached at a phosphate (e.g. 5′ or 3′ phosphate) of the oligonucleotide. In some embodiments, the lipid or hydrocarbon, and the end of the sense are connected to the phenyl or cyclohexyl linker in the 1,4; 1,3; or 1,2 substitution pattern (e.g. the para, meta, or ortho phenyl configuration). In some embodiments, the lipid or hydrocarbon, and the end of the sense are connected to the phenyl or cyclohexyl linker in the 1,4 substitution pattern (e.g. the para phenyl configuration). The lipid may be attached to the carbocycle in the 1,4 substitution pattern relative to the oligonucleotide. The lipid may be attached to the carbocycle in the 1,3 substitution pattern relative to the oligonucleotide. The lipid may be attached to the carbocycle in the 1,2 substitution pattern relative to the oligonucleotide. The lipid may be attached to the carbocycle in the ortho orientation relative to the oligonucleotide. The lipid may be attached to the carbocycle in the para orientation relative to the oligonucleotide. The lipid may be attached to the carbocycle in the meta orientation relative to the oligonucleotide.

[0093] The lipid moiety may comprise or consist of the following structure:

[chemical structure]

In some embodiments, the lipid moiety comprises or consists of the following structure:

[chemical structure]

In some embodiments, the lipid moiety comprises the following structure:

[chemical structure]

In some embodiments, the lipid moiety comprises or consist of the following structure:

[chemical structure]

In some embodiments, the dotted line indicates a covalent connection. The covalent connection may between an end of the sense or antisense strand. For example, the connection may be to the 5′ end of the sense strand. In some embodiments, n is 0-3. In some embodiments, n is 1-3. In some embodiments, n is 0. In some embodiments, n is 1. In some embodiments, n is 2. In some embodiments, n is 3. In some embodiments, n is 4. In some embodiments, n is 5. In some embodiments, n is 1, 2, 3, 4, 5, 6, 7, 8, 9, or 10. In some embodiments, R is an alkyl group. In some embodiments, the alkyl group contains 1, 2, 3, 4, 5, 6, 7, 8, 9, 10, 11, 12, 13, 14, 15, 16, 17, 18, 19, or 20 carbons. In some embodiments, the alkyl group contains 4, 5, 6, 7, 8, 9, 10, 11, 12, 13, 14, 15, 16, 17, or 18 carbons, or a range defined by any two of the aforementioned numbers of carbons. In some embodiments, R comprises or consists of an alkyl group containing 4-18 carbons.

[0094] The lipid moiety may be attached at a 5′ end of the oligonucleotide. The 5′ end may have one phosphate linking the lipid moiety to a 5′ carbon of a sugar of the oligonucleotide. The 5′ end may have two phosphates linking the lipid moiety to a 5′ carbon of a sugar of the oligonucleotide. The 5′ end may have three phosphates linking the lipid moiety to a 5′ carbon of a sugar of the oligonucleotide. The 5′ end may have one phosphate connected to the 5′ carbon of a sugar of the oligonucleotide, where the one phosphate is connected to the lipid moiety. The 5′ end may have two phosphates connected to the 5′ carbon of a sugar of the oligonucleotide, where the one of the two phosphates is connected to the lipid moiety. The 5′ end may have three phosphates connected to the 5′ carbon of a sugar of the oligonucleotide, where the one of the three phosphates is connected to the lipid moiety. The sugar may include a ribose. The sugar may include a deoxyribose. The sugar may be modified a such as a 2′ modified sugar (e.g. a 2′ O-methyl or 2′ fluoro ribose). A phosphate of the 5′ end may include a modification such as a sulfur in place of an oxygen. Two phosphates of the 5′ end may include a modification such as a sulfur in place of an oxygen. Three phosphates of the 5′ end may include a modification such as a sulfur in place of an oxygen.

[0095] In some embodiments, the oligonucleotide includes 1 lipid moiety. In some embodiments, the oligonucleotide includes 2 lipid moieties. In some embodiments, the oligonucleotide includes 3 lipid moieties. In some embodiments, the oligonucleotide includes 4 lipid moieties.

[0096] Some embodiments relate to a method of making an oligonucleotide comprising a hydrophobic conjugate. A strategy for making hydrophobic conjugates may include use of a phosphoramidite reagent based upon a 6-membered ring alcohol such as a phenol or cyclohexanol. The phosphoramidite may be reacted to a nucleotide to connect the nucleotide to the hydrophobic moiety, and thereby produce the hydrophobic conjugate. Some examples of phosphoramidite reagents that may be used to produce a hydrophobic conjugate are provided as follows:

[chemical structure]

In some embodiments, n is 1-3. In some embodiments, n is 1. In some embodiments, n is 2. In some embodiments, n is 3. In some embodiments, R is an alkyl group. In some embodiments, the alkyl group contains 1, 2, 3, 4, 5, 6, 7, 8, 9, 10, 11, 12, 13, 14, 15, 16, 17, 18, 19, or 20 carbons. In some embodiments, the alkyl group contains 4, 5, 6, 7, 8, 9, 10, 11, 12, 13, 14, 15, 16, 17, or 18 carbons, or a range defined by any two of the aforementioned numbers of carbons. In some embodiments, R comprises or consists of an alkyl group containing 4-18 carbons. Any one of the phosphoramidite reagents may be reacted to a 5′ end of an oligonucleotide to produce an oligonucleotide comprising a hydrophobic moiety. In some embodiments, the phosphoramidite reagents is reacted to a 5′ end of a sense strand of an siRNA. The sense strand may then be hybridized to an antisense strand to form a duplex. The hybridization may be performed by incubating the sense and antisense strands in solution at a given temperature. The temperature may be gradually reduced. The temperature may comprise or include a temperature comprising an annealing temperature for the sense and antisense strands. The temperature may be below or include a temperature below the annealing temperature for the sense and antisense strands. The temperature may be below a melting temperature of the sense and antisense strands.

[0097] The lipid may be attached to the oligonucleotide by a linker. The linker may include a polyethyleneglycol (e.g. tetraethyleneglycol).

### 2. Sugar Moieties

[0098] In some embodiments, the composition comprises an oligonucleotide that inhibits the expression of MS4A4E, wherein the oligonucleotide comprises a sugar moiety. The sugar moiety may include an N-acetyl galactose moiety (e.g. an N-acetylgalactosamine (GalNAc) moiety), an N-acetyl glucose moiety (e.g. an N-acetylglucosamine (GlcNAc) moiety), a fucose moiety, or a mannose moiety. The sugar moiety may include 1, 2, 3, or more sugar molecules. The sugar moiety may be attached at a 3′ or 5′ terminus of the oligonucleotide. The sugar moiety may include an N-acetyl galactose moiety. The sugar moiety may include an N-acetylgalactosamine (GalNAc) moiety. The sugar moiety may include an N-acetyl glucose moiety. The sugar moiety may include N-acetylglucosamine (GlcNAc) moiety. The sugar moiety may include a fucose moiety. The sugar moiety may include a mannose moiety. N-acetyl glucose, GlcNAc, fucose, or mannose may be useful for targeting macrophages when they target or bind a mannose receptor such as CD206. The sugar moiety may be useful for binding or targeting an asialoglycoprotein receptor such as an asialoglycoprotein receptor of a hepatocyte. The GalNAc moiety may bind to an asialoglycoprotein receptor. The GalNAc moiety may target a hepatocyte.

[0099] In some embodiments, the composition comprises an oligonucleotide that inhibits the expression of MS4A4E, wherein the oligonucleotide comprises an N-acetylgalactosamine (GalNAc) moiety. GalNAc may be useful for hepatocyte targeting. The GalNAc moiety may include a bivalent or trivalent branched linker. The oligonucleotide may be attached to 1, 2 or 3 GalNAcs through a bivalent or trivalent branched linker. The GalNAc moiety may include 1, 2, 3, or more GalNAc molecules. The GalNAc moiety may be attached at a 3′ or 5′ terminus of the oligonucleotide.

[0100] In some embodiments, the composition comprises an oligonucleotide that inhibits the expression of MS4A4E, wherein the oligonucleotide comprises an N-acetylgalactosamine (GalNAc) ligand for hepatocyte targeting. In some embodiments, the composition comprises GalNAc. In some embodiments, the composition comprises a GalNAc derivative. In some embodiments, the GalNAc ligand is attached at a 3′ terminus of the oligonucleotide. In some embodiments, the GalNAc ligand is attached at a 5′ terminus of the oligonucleotide. In some embodiments, the composition comprises a sense strand, and the GalNAc ligand is attached to the sense strand (e.g. attached to a 5′ end of the sense strand, or attached to a 3′ end of the sense strand). In some embodiments, the composition comprises an antisense strand, and the GalNAc ligand is attached to the antisense strand (e.g. attached to a 5′ end of the antisense strand, or attached to a 3′ end of the antisense strand). In some embodiments, the composition comprises a GalNAc ligand attached at a 3′ or 5′ terminus of the oligonucleotide.

[0101] Disclosed herein, in some embodiments, are compositions comprising an oligonucleotide that inhibits the expression of MS4A4E, wherein the oligonucleotide comprises a GalNAc moiety. The GalNAc moiety may be included in any formula, structure, or GalNAc moiety shown below. In some embodiments, described herein is a compound (e.g. oligonucleotide) represented by Formula (I) or (II):

[chemical structure]

[0102] or a salt thereof, wherein
[0103] J is an oligonucleotide;
[0104] each w is independently selected from any value from 1 to 20;
[0105] each v is independently selected from any value from 1 to 20;
[0106] n is selected from any value from 1 to 20;
[0107] m is selected from any value from 1 to 20;
[0108] z is selected from any value from 1 to 3, wherein
   [0109] if z is 3, Y is C
   [0110] if z is 2, Y is CR⁶, or
   [0111] if z is 1, Y is C(R⁶)₂;
[0112] Q is selected from:
   [0113] C₃₋₁₀ carbocycle optionally substituted with one or more substituents independently selected from halogen, —CN, —NO₂, —OR⁷, —SR⁷, —N(R⁷)₂, —C(O)R⁷, —C(O)N(R⁷)₂, —N(R⁷)C(O)R⁷, —N(R⁷)C(O)N(R⁷)₂, —OC(O)N(R⁷)₂, —N(R⁷)C(O)OR⁷, —C(O)OR⁷, —OC(O)R⁷, —S(O)R⁷, and C₁₋₆ alkyl, wherein the C₁₋₆ alkyl, is optionally substituted with one or more substituents independently selected from halogen, —CN, —OH, —SH, —NO₂, and —NH₂; R¹ is a linker selected from:
   [0114] —O—, —S—, —N(R⁷)—, —C(O)—, —C(O)N(R⁷)—, —N(R⁷)C(O)—, —N(R⁷)C(O)N(R⁷)—, —OC(O)N(R⁷)—, —N(R⁷)C(O)O—, —C(O)O—, —OC(O)—, —S(O)—, —S(O)₂—, —OS(O)₂—, —OP(O)(OR⁷)O—, —SP(O)(OR⁷)O—, —OP(S)(OR⁷)O—, —OP(O)(SR⁷)O—, —OP(O)(OR⁷)S—, —OP(O)(O⁻)O—, —SP(O)(O⁻)O—, —OP(S)(O⁻)O—, —OP(O)(S⁻)O—, —OP(O)(O⁻)S—, —OP(O)(OR⁷)NR⁷—, —OP(O)(N(R⁷)₂)NR⁷—, —OP(OR⁷)O—, —OP(N(R⁷)₂)O—, —OP(OR⁷)N(R⁷)—, and —OPN(R⁷)₂NR⁷—;
[0115] each R² is independently selected from:
   [0116] C₁₋₆ alkyl optionally substituted with one or more substituents independently selected from halogen, —OR⁷, —SR⁷, —N(R⁷)₂, —C(O)R⁷, —C(O)N(R⁷)₂, —N(R⁷)C(O)R⁷, —N(R⁷)C(O)N(R⁷)₂, —OC(O)N(R⁷)₂, —N(R⁷)C(O)OR⁷, —C(O)OR⁷, —OC(O)R⁷, and —S(O)R⁷;
[0117] R³ and R⁴ are each independently selected from:
   [0118] —OR⁷, —SR⁷, —N(R⁷)₂, —C(O)R⁷, —C(O)N(R⁷)₂, —N(R⁷)C(O)R⁷, —N(R⁷)C(O)N(R⁷)₂, —OC(O)N(R⁷)₂, —N(R⁷)C(O)OR⁷, —C(O)OR⁷, —OC(O)R⁷, and —S(O)R⁷;
[0119] each R⁵ is independently selected from:
   [0120] —OC(O)R⁷, —OC(O)N(R⁷)₂, —N(R⁷)C(O)R⁷, —N(R⁷)C(O)N(R⁷)₂, —N(R⁷)C(O)OR⁷, —C(O)R⁷, —C(O)OR⁷, and —C(O)N(R⁷)₂;
[0121] each R⁶ is independently selected from:
   [0122] hydrogen;
   [0123] halogen, —CN, —NO₂, —OR⁷, —SR⁷, —N(R⁷)₂, —C(O)R⁷, —C(O)N(R⁷)₂, —N(R⁷)C(O)R⁷, —N(R⁷)C(O)N(R⁷)₂, —OC(O)N(R⁷)₂, —N(R⁷)C(O)OR⁷, —C(O)OR⁷, —OC(O)R⁷, and —S(O)R⁷; and
   [0124] C₁₋₆ alkyl optionally substituted with one or more substituents independently selected from halogen, —CN, —NO₂, —OR⁷, —SR⁷, —N(R⁷)₂, —C(O)R⁷, —C(O)N(R⁷)₂, —N(R⁷)C(O)R⁷, —N(R⁷)C(O)N(R⁷)₂, —OC(O)N(R⁷)₂, —N(R⁷)C(O)OR⁷, —C(O)OR⁷, —OC(O)R⁷, and —S(O)R⁷;
[0125] each R⁷ is independently selected from:
   [0126] hydrogen;
   [0127] C₁₋₆ alkyl, C₂₋₆ alkenyl, and C₂₋₆ alkynyl, each of which is optionally substituted with one or more substituents independently selected from halogen, —CN, —OH, —SH, —NO₂, —NH₂, ═O, ═S, —O—C₁₋₆ alkyl, —S—C₁₋₆ alkyl, —N(C₁₋₆ alkyl)₂, —NH(C₁₋₆ alkyl), C₃₋₁₀ carbocycle, and 3- to 10-membered heterocycle; and
   [0128] C₃₋₁₀ carbocycle, and 3- to 10-membered heterocycle, each of which is optionally substituted with one or more substituents independently selected from halogen, —CN, —OH, —SH, —NO₂, —NH₂, ═O, ═S, —O—C₁₋₆ alkyl, —S—C₁₋₆ alkyl, —N(C₁₋₆ alkyl)₂, —NH(C₁₋₆ alkyl), C₁₋₆ alkyl, C₂₋₆ alkenyl, C₂₋₆ alkynyl, C₃₋₁₀ carbocycle, 3- to 10-membered heterocycle, and C₁₋₆ haloalkyl.
[0129] In some embodiments, each w is independently selected from any value from 1 to 10. In some embodiments, each w is independently selected from any value from 1 to 5. In some embodiments, each w is 1. In some embodiments, each v is independently selected from any value from 1 to 10. In some embodiments, each v is independently selected from any value from 1 to 5. In some embodiments, each v is 1. In some embodiments, n is selected from any value from 1 to 10. In some embodiments, n is selected from any value from 1 to 5. In some embodiments, n is 2. In some embodiments, m is selected from any value from 1 to 10. In some embodiments, m is selected from any value from 1 to 5. In some embodiments, m is selected from 1 and 2. In some embodiments, z is 3 and Y is C. In some embodiments, Q is selected from C₅₋₆ carbocycle optionally substituted with one or more substituents independently selected from halogen, —CN, —NO₂, —OR⁷, —SR⁷, —N(R⁷)₂, —C(O)R⁷, —C(O)N(R⁷)₂, —N(R⁷)C(O)R⁷, —N(R⁷)C(O)N(R⁷)₂, —OC(O)N(R⁷)₂, —N(R⁷)C(O)OR⁷, —C(O)OR⁷, —OC(O)R⁷, and —S(O)R⁷. In some embodiments, Q is selected from C₅₋₆ carbocycle optionally substituted with one or more substituents independently selected from halogen, —CN, —OH, —SH, —NO₂, and —NH₂. In some embodiments, Q is selected from phenyl and cyclohexyl, each of which is optionally substituted with one or more substituents independently selected from halogen, —CN, —OH, —SH, —NO₂, and —NH₂. In some embodiments, Q is selected from phenyl. In some embodiments, Q is selected from cyclohexyl. In some embodiments, R¹ is selected from —OP(O)(OR⁷)O—, —SP(O)(OR⁷)O—, —OP(S)(OR⁷)O—, —OP(O)(SR⁷)O—, —OP(O)(OR⁷)S—, —OP(O)(O⁻)O—, —SP(O)(O⁻)O—, —OP(S)(O⁻)O—, —OP(O)(S—)O—, —OP(O)(O⁻)S—, —OP(O)(OR⁷)NR⁷—, —OP(O)(N(R⁷)₂)NR⁷—, —OP(OR⁷)O—, —OP(N(R⁷)₂)O—, —OP(OR⁷)N(R⁷)—, and —OPN(R⁷)₂—NR⁷. In some embodiments, R¹ is selected from —OP(O)(OR⁷)O—, —SP(O)(OR⁷)O—, —OP(S)(OR⁷)O—, —OP(O)(SR⁷)O—, —OP(O)(OR⁷)S—, —OP(O)(O⁻)O—, —SP(O)(O⁻)O—, —OP(S)(O⁻)O—, —OP(O)(S—)O—, —OP(O)(O⁻)S—, and —OP(OR⁷)O—. In some embodiments, R¹ is selected from —OP(O)(OR⁷)O—, —OP(S)(OR⁷)O—, —OP(O)(O⁻)O—, —OP(S)(O⁻)O—, —OP(O)(S—)O—, and —OP(OR⁷)O—. In some embodiments, R¹ is selected from —OP(O)(OR⁷)O— and —OP(OR⁷)O—. In some embodiments, R² is selected from C₁₋₃ alkyl substituted with one or more substituents independently selected from halogen, —OR⁷, —OC(O)R⁷, —SR⁷, —N(R⁷)₂, —C(O)R⁷, and —S(O)R⁷. In some embodiments, R² is selected from C₁₋₃ alkyl substituted with one or more substituents independently selected from —OR⁷, —OC(O)R⁷, —SR⁷, and —N(R⁷)₂. In some embodiments, R² is selected from C₁₋₃ alkyl substituted with one or more substituents independently selected from —OR⁷ and —OC(O)R⁷. In some embodiments, R³ is selected from halogen, —OR⁷, —SR⁷, —N(R⁷)₂, —C(O)R⁷, —OC(O)R⁷, and —S(O)R⁷. In some embodiments, R³ is selected from —OR⁷—SR⁷, —OC(O)R⁷, and —N(R⁷)₂. In some embodiments, R³ is selected from —OR⁷— and —OC(O)R⁷. In some embodiments, R⁴ is selected from halogen, —OR⁷, —SR⁷, —N(R⁷)₂, —C(O)R⁷, —OC(O)R⁷, and —S(O)R⁷. In some embodiments, R⁴ is selected from —OR⁷—SR⁷, —OC(O)R⁷, and —N(R⁷)₂. In some embodiments, R⁴ is selected from —OR⁷— and —OC(O)R⁷. In some embodiments, R⁷ is selected from —OC(O)R⁷, —OC(O)N(R⁷)₂, —N(R⁷)C(O)R⁷, —N(R⁷)C(O)N(R⁷)₂, and —N(R⁷)C(O)OR⁷. In some embodiments, R⁷ is selected from —OC(O)R⁷ and —N(R⁷)C(O)R⁷. In some embodiments, each R⁷ is independently selected from: hydrogen; and C₁₋₆ alkyl optionally substituted with one or more substituents independently selected from halogen, —CN, —OH, —SH, —NO₂, —NH₂, ═O, ═S, —O—C₁₋₆ alkyl, —S—C₁₋₆ alkyl, —N(C₁₋₆ alkyl)₂, —NH(C₁₋₆ alkyl), C₃₋₁₀ carbocycle, or 3- to 10-membered heterocycle. In some embodiments, each R⁷ is independently selected from C₁₋₆ alkyl optionally substituted with one or more substituents independently selected from halogen, —CN, —OH, —SH, —NO₂, —NH₂, =0, ═S, —O—C₁₋₆ alkyl, —S—C₁₋₆ alkyl, —N(C₁₋₆ alkyl)₂, and —NH(C₁₋₆ alkyl). In some embodiments, each R⁷ is independently selected from C₁₋₆ alkyl optionally substituted with one or more substituents independently selected from halogen, —CN, —OH, and —SH. In some embodiments, w is 1; v is 1; n is 2; m is 1 or 2; z is 3 and Y is C; Q is phenyl or cyclohexyl, each of which is optionally substituted with one or more substituents independently selected from halogen, —CN, —OH, —SH, —NO₂, —NH₂, and C₁₋₃ alkyl; R¹ is selected from —OP(O)(OR⁷)O—, —OP(S)(OR⁷)O—, —OP(O)(O⁻)O—, —OP(S)(O⁻)O—, —OP(O)(S⁻)O—, and —OP(OR⁷)O—; R² is C₁ alkyl substituted with —OH or —OC(O)CH₃;
[0130] R³ is —OH or —OC(O)CH₃; R⁴ is —OH or —OC(O)CH₃; and R⁵ is —NH(O)CH₃. In some embodiments, the compound comprises:

[chemical structure]

[chemical structure]

[chemical structure]

[chemical structure]

[chemical structure]

[chemical structure]

[chemical structure]

[chemical structure]

[chemical structure]

[0131] In some embodiments, the oligonucleotide (J) is attached at a 5′ end or a 3′ end of the oligonucleotide. In some embodiments, the oligonucleotide comprises DNA. In some embodiments, the oligonucleotide comprises RNA. In some embodiments, the oligonucleotide comprises one or more modified internucleoside linkages. In some embodiments, the one or more modified internucleoside linkages comprise alkylphosphonate, phosphorothioate, methylphosphonate, phosphorodithioate, alkylphosphonothioate, phosphoramidate, carbamate, carbonate, phosphate triester, acetamidate, or carboxymethyl ester, or a combination thereof. In some embodiments, the oligonucleotide comprises 1, 2, 3, 4, 5, 6, 7, 8, 9, 10, 11, 12, 13, 14, 15, 16, 17, 18, 19, or 20 modified internucleoside linkages. In some embodiments, the compound binds to an asialoglycoprotein receptor. In some embodiments, the compound targets a hepatocyte.

[0132] Some embodiments include the following, where J is the oligonucleotide:

[chemical structure]

[0133] Some embodiments include the following, where J is the oligonucleotide:

[chemical structure]

The structure attached to the oligonucleotide (J) is an example of a GalNAc moiety. J may include one or more phosphates linking to the oligonucleotide.

[0134] Some embodiments include the following, where the phosphate or “5′” indicates a connection to the oligonucleotide:

[chemical structure]

[0135] Some embodiments include the following, where the phosphate or “5′” indicates a connection to the oligonucleotide:

[chemical structure]

[0136] Some embodiments include the following, where J is the oligonucleotide:

[chemical structure]

include one or more phosphates or phosphorothioates linking to the oligonucleotide. J may include one or more phosphates linking to the oligonucleotide. J may include a phosphate linking to the oligonucleotide. J may include one or more phosphorothioates linking to the oligonucleotide. J may include a phosphorothioate linking to the oligonucleotide.

[0137] Some embodiments include the following, where J is the oligonucleotide.

[chemical structure]

The structure in this compound attached to the oligonucleotide (J) may be referred to as “ETL1,” and is an example of a GalNAc moiety. J may include one or more phosphates or phosphorothioates linking to the oligonucleotide. J may include one or more phosphates linking to the oligonucleotide. J may include a phosphate linking to the oligonucleotide. J may include one or more phosphorothioates linking to the oligonucleotide. J may include a phosphorothioate linking to the oligonucleotide.

[0138] Some embodiments include the following, where J is the oligonucleotide:

[chemical structure]

J may include one or more additional phosphates, or one or more phosphorothioates linking to the oligonucleotide. J may include one or more additional phosphates linking to the oligonucleotide. J may include one or more phosphorothioates linking to the oligonucleotide.

[0139] Some embodiments include the following, where J is the oligonucleotide:

[chemical structure]

J may include one or more additional phosphates, or one or more phosphorothioates linking to the oligonucleotide. J may include one or more additional phosphates linking to the oligonucleotide. J may include one or more phosphorothioates linking to the oligonucleotide.

[0140] Some embodiments include the following, where J is the oligonucleotide:

[chemical structure]

J may include one or more phosphates or phosphorothioates linking to the oligonucleotide. J may include one or more phosphates linking to the oligonucleotide. J may include a phosphate linking to the oligonucleotide. J may include one or more phosphorothioates linking to the oligonucleotide. J may include a phosphorothioate linking to the oligonucleotide.

[0141] Some embodiments include the following, where J is the oligonucleotide:

[chemical structure]

The structure in this compound attached to the oligonucleotide (J) may be referred to as “ETL17,” and is an example of a GalNAc moiety. J may include one or more phosphates or phosphorothioates linking to the oligonucleotide. J may include one or more phosphates linking to the oligonucleotide. J may include a phosphate linking to the oligonucleotide. J may include one or more phosphorothioates linking to the oligonucleotide. J may include a phosphorothioate linking to the oligonucleotide.
3. Modified siRNAs

[0142] In some embodiments, the composition comprises an oligonucleotide that inhibits the expression of MS4A4E, wherein the oligonucleotide comprises an siRNA comprising a sense strand and an antisense strand, wherein the sense strand comprises modification pattern 1S:
[0143] 5′-NfsnsNfnNfnNfNfNfnNfnNfnNfnNfnNfsnsn-3′, wherein “Nf” is a 2′ fluoro-modified nucleoside, “n” is a 2′ O-methyl modified nucleoside, and “s” is a phosphorothioate or phosphate linkage. In some embodiments, the sense strand comprises modification pattern 2S: 5′-nsnsnnNfnNfNfNfnnnnnnnnnnsnsn-3′, wherein “Nf” is a 2′ fluoro-modified nucleoside, “n” is a 2′ O-methyl modified nucleoside, and “s” is a phosphorothioate or phosphate linkage. In some embodiments, the sense strand comprises modification pattern 3S: 5′-nsnsnnNfnNfnNfnnnnnnnnnnsnsn-3′, wherein “Nf” is a 2′ fluoro-modified nucleoside, “n” is a 2′ O-methyl modified nucleoside, and “s” is a phosphorothioate or phosphate linkage. In some embodiments, the sense strand comprises modification pattern 4S:
[0144] 5′-NfsnsNfnNfnNfNfNfnNfnNfnNfnNfnNfsnsnN-moiety-3′, wherein “Nf” is a 2′ fluoro-modified nucleoside, “n” is a 2′ O-methyl modified nucleoside, “s” is a phosphorothioate or phosphate linkage, and N comprises one or more nucleosides. In some embodiments, the sense strand comprises modification pattern 5S: 5′-nsnsnnNfnNfNfNfnnnnnnnnnnsnsnN-moiety-3′, wherein “Nf” is a 2′ fluoro-modified nucleoside, “n” is a 2′ O-methyl modified nucleoside, “s” is a phosphorothioate or phosphate linkage, and N comprises one or more nucleosides. In some embodiments, the moiety in modification pattern 4S or 5S is a lipid moiety. In some embodiments, the moiety in modification pattern 4S or 5S is a sugar moiety. In some embodiments, the sense strand comprises modification pattern 6S:
[0145] 5′-NfsnsNfnNfnNfnNfnNfnNfnNfnNfnNfsnsn-3′, wherein “Nf” is a 2′ fluoro-modified nucleoside, “n” is a 2′ O-methyl modified nucleoside, and “s” is a phosphorothioate or phosphate linkage. In some embodiments, the sense strand comprises modification pattern 7S:
[0146] 5′-nsnsnnNfNfNfNfNfnnnnnnnnnnsnsn-3′, wherein “Nf” is a 2′ fluoro-modified nucleoside, “n” is a 2′ O-methyl modified nucleoside, and “s” is a phosphorothioate or phosphate linkage. In some embodiments, the sense strand comprises modification pattern 8S: 5′-nsnsnnnNfNfNfNfnnnnnnnnnnsnsn-3′, wherein “Nf” is a 2′ fluoro-modified nucleoside, “n” is a 2′ O-methyl modified nucleoside, and “s” is a phosphorothioate or phosphate linkage. In some embodiments, the sense strand comprises modification pattern 9S: 5′-nsnsnnnnNfNfNfNfnnnnnnnnnsnsn-3′, wherein “Nf” is a 2′ fluoro-modified nucleoside, “n” is a 2′ O-methyl modified nucleoside, and “s” is a phosphorothioate or phosphate linkage. In some embodiments, the sense strand comprises modification pattern 10S: 5′-nnnnNfNfnnNfnNfnnnnnnnnsnsn-3′, wherein “Nf” is a 2′ fluoro-modified nucleoside, “n” is a 2′ O-methyl modified nucleoside, “s” is a phosphorothioate or phosphate linkage, and N comprises one or more nucleosides. In some embodiments, the sense strand comprises modification pattern 11S: 5′-nnnnNfNfnnNfnnnnnnnnnnsnsn-3′, wherein “Nf” is a 2′ fluoro-modified nucleoside, “n” is a 2′ O-methyl modified nucleoside, “s” is a phosphorothioate or phosphate linkage, and N comprises one or more nucleosides. In some embodiments, the sense strand comprises modification pattern 12S: 5′-nnnnnNfnNfNfnNfnnnnnnnnsnsn-3′, wherein “Nf” is a 2′ fluoro-modified nucleoside, “n” is a 2′ O-methyl modified nucleoside, “s” is a phosphorothioate or phosphate linkage, and N comprises one or more nucleosides. In some embodiments, the sense strand comprises modification pattern 13S: 5′-nnnnnNfnNfNfnNfnnnnnnnnsnsn-3′, wherein “Nf” is a 2′ fluoro-modified nucleoside, “n” is a 2′ O-methyl modified nucleoside, “s” is a phosphorothioate or phosphate linkage, and N comprises one or more nucleosides. In some embodiments, the sense strand comprises modification pattern 14S: 5′-nnnnNfnNfNfdNnnnnnnnnnnsnsn-3′, wherein “Nf” is a 2′ fluoro-modified nucleoside, “n” is a 2′ O-methyl modified nucleoside, “s” is a phosphorothioate or phosphate linkage, “dN” is any deoxynucleotide, and N comprises one or more nucleosides. In some embodiments, the sense strand comprises modification pattern 15S: 5′-nnnnnNfnNfNfnNfnnnnnnnnsnsn-3′, wherein “Nf” is a 2′ fluoro-modified nucleoside, “n” is a 2′ O— methyl modified nucleoside, “s” is a phosphorothioate or phosphate linkage, and N comprises one or more nucleosides. In some embodiments, the sense strand comprises modification pattern 16S: 5′-nnnnNfnNfnNfNfnnnnnnnnnsnsn-3′, wherein “Nf” is a 2′ fluoro-modified nucleoside, “n” is a 2′ O— methyl modified nucleoside, “s” is a phosphorothioate or phosphate linkage, and N comprises one or more nucleosides. In some embodiments, the sense strand comprises modification pattern 17S: 5′-nnnnnNfNfnNfNfnnnnnnnnnsnsn-3′, wherein “Nf” is a 2′ fluoro-modified nucleoside, “n” is a 2′ O— methyl modified nucleoside, “s” is a phosphorothioate or phosphate linkage, and N comprises one or more nucleosides. In some embodiments, the sense strand comprises modification pattern 18S: 5′-nnnnnNfNfNfNfnNfnnnnnnnnsnsn-3′, wherein “Nf” is a 2′ fluoro-modified nucleoside, “n” is a 2′ O— methyl modified nucleoside, “s” is a phosphorothioate or phosphate linkage, and N comprises one or more nucleosides. In some embodiments, the sense strand comprises modification pattern 19S: 5′-nnnnnnNfnNfNfnnnnnnnnnsnsn-3′, wherein “Nf” is a 2′ fluoro-modified nucleoside, “n” is a 2′ O-methyl modified nucleoside, “s” is a phosphorothioate or phosphate linkage, and N comprises one or more nucleosides. In some embodiments, the sense strand comprises modification pattern 20S: 5′-nnnnNfNfnnNfNfnnnnnnnnnsnsn-3′, wherein “Nf” is a 2′ fluoro-modified nucleoside, “n” is a 2′ O— methyl modified nucleoside, “s” is a phosphorothioate or phosphate linkage, and N comprises one or more nucleosides. In some embodiments, the sense strand comprises modification pattern 21S: 5′-nnnnNfnnNfNfnNfnnnnnnnnsnsn-3′, wherein “Nf” is a 2′ fluoro-modified nucleoside, “n” is a 2′ O— methyl modified nucleoside, “s” is a phosphorothioate or phosphate linkage, and N comprises one or more nucleosides. In some embodiments, the sense strand comprises modification pattern 22S: 5′-nnnnnnNfnNfnNfhnnnnnnnsnsn-3′, wherein “Nf” is a 2′ fluoro-modified nucleoside, “n” is a 2′ O-methyl modified nucleoside, “s” is a phosphorothioate or phosphate linkage, and N comprises one or more nucleosides. In some embodiments, the sense strand comprises modification pattern 23S: 5′-nnnnnNfhnNfhNfnnnnnnnnsnsn-3′, wherein “Nf” is a 2′ fluoro-modified nucleoside, “n” is a 2′ O-methyl modified nucleoside, “s” is a phosphorothioate or phosphate linkage, and N comprises one or more nucleosides. In some embodiments, the sense strand comprises modification pattern 24S: 5′-nnnnNfnnnNfhNfnnnnnnnnsnsn-3′, wherein “Nf” is a 2′ fluoro-modified nucleoside, “n” is a 2′ O-methyl modified nucleoside, “s” is a phosphorothioate or phosphate linkage, and N comprises one or more nucleosides. In some embodiments, the sense strand comprises modification pattern 25S: 5′-nnnnnNfNfnNfnnnnnnnnnnsnsn-3′, wherein “Nf” is a 2′ fluoro-modified nucleoside, “n” is a 2′ O-methyl modified nucleoside, “s” is a phosphorothioate or phosphate linkage, and N comprises one or more nucleosides. In some embodiments, the sense strand comprises modification pattern 26S: 5′-nnnnnnnNfNfnNfnnnnnnnnsnsn-3′, wherein “Nf” is a 2′ fluoro-modified nucleoside, “n” is a 2′ O-methyl modified nucleoside, “s” is a phosphorothioate or phosphate linkage, and N comprises one or more nucleosides. In some embodiments, the sense strand comprises modification pattern 27S: 5′-nnnnnNfnNfNfnnnnnnnnnnsnsn-3′, wherein “Nf” is a 2′ fluoro-modified nucleoside, “n” is a 2′ O-methyl modified nucleoside, “s” is a phosphorothioate or phosphate linkage, and N comprises one or more nucleosides. In some embodiments, the sense strand comprises modification pattern 28S: 5′-nnnnnnnNfNfnnnnnnnnnnsnsn-3′, wherein “Nf” is a 2′ fluoro-modified nucleoside, “n” is a 2′ O-methyl modified nucleoside, “s” is a phosphorothioate or phosphate linkage, and N comprises one or more nucleosides. In some embodiments, the sense strand comprises modification pattern 29S: 5′-nnnnNfnnnNfnnnnnnnnnnsnsn-3′, wherein “Nf” is a 2′ fluoro-modified nucleoside, “n” is a 2′ O-methyl modified nucleoside, “s” is a phosphorothioate or phosphate linkage, and N comprises one or more nucleosides. In some embodiments, the sense strand comprises modification pattern 30S: 5′-nnnnnnnNfNfNfNfnnnnnnnnsnsn-3′, wherein “Nf” is a 2′ fluoro-modified nucleoside, “n” is a 2′ O— methyl modified nucleoside, “s” is a phosphorothioate or phosphate linkage, and N comprises one or more nucleosides. In some embodiments, the sense strand comprises modification pattern 31S: 5′-nnnnnnNfNfNfNfnnnnnnnnnsnsn-3′, wherein “Nf” is a 2′ fluoro-modified nucleoside, “n” is a 2′ O— methyl modified nucleoside, “s” is a phosphorothioate or phosphate linkage, and N comprises one or more nucleosides. In some embodiments, the sense strand comprises modification pattern 32S: 5′-nnnnnnNfNfNfNfNfnnnnnnnnsnsn-3′, wherein “Nf” is a 2′ fluoro-modified nucleoside, “n” is a 2′ O— methyl modified nucleoside, “s” is a phosphorothioate or phosphate linkage, and N comprises one or more nucleosides. In some embodiments, the sense strand comprises modification pattern 33S: 5′-nnnnNfnnnNfNfnnnnnnnnnsnsn-3′, wherein “Nf” is a 2′ fluoro-modified nucleoside, “n” is a 2′ O-methyl modified nucleoside, “s” is a phosphorothioate or phosphate linkage, and N comprises one or more nucleosides. In some embodiments, the sense strand comprises modification pattern 34S: 5′-nnnnNfnnNfNfnnnnnnnnnnsnsn-3′, wherein “Nf” is a 2′ fluoro-modified nucleoside, “n” is a 2′ O-methyl modified nucleoside, “s” is a phosphorothioate or phosphate linkage, and N comprises one or more nucleosides. In some embodiments, the sense strand comprises modification pattern 35S: 5′-nnnnNfnnNfNfNfNfnnnnnnnnsnsn-3′, wherein “Nf” is a 2′ fluoro-modified nucleoside, “n” is a 2′ O— methyl modified nucleoside, “s” is a phosphorothioate or phosphate linkage, and N comprises one or more nucleosides. In some embodiments, the sense strand comprises modification pattern 36S: 5′-nnnnNfnNfnNfnNfnnnnnnnnsnsn-3′, wherein “Nf” is a 2′ fluoro-modified nucleoside, “n” is a 2′ O— methyl modified nucleoside, “s” is a phosphorothioate or phosphate linkage, and N comprises one or more nucleosides. In some embodiments, the sense strand comprises modification pattern 37S: 5′-nnnnnNfnnNfNfnnnnnnnnnsnsn-3′, wherein “Nf” is a 2′ fluoro-modified nucleoside, “n” is a 2′ O-methyl modified nucleoside, “s” is a phosphorothioate or phosphate linkage, and N comprises one or more nucleosides. In some embodiments, the sense strand comprises modification pattern 38S: 5′-nnnnnNfNfnNfnNfnnnnnnnnsnsn-3′, wherein “Nf” is a 2′ fluoro-modified nucleoside, “n” is a 2′ O— methyl modified nucleoside, “s” is a phosphorothioate or phosphate linkage, and N comprises one or more nucleosides. In some embodiments, the sense strand comprises modification pattern 39S: 5′-nnnnnNfNfNfNfnnnnnnnnnnsnsn-3′, wherein “Nf” is a 2′ fluoro-modified nucleoside, “n” is a 2′ O— methyl modified nucleoside, “s” is a phosphorothioate or phosphate linkage, and N comprises one or more nucleosides. In some embodiments, the sense strand comprises modification pattern 40S: 5′-snnnNmnNfNfNfNfnnnNmnnnnnnsnsn-3′, wherein “Nf” is a 2′ fluoro-modified nucleoside, “n” is a 2′ O-methyl modified nucleoside, “s” is a phosphorothioate or phosphate linkage, “Nm” is a 2′ O— methoxyethyl modified nucleoside, and N comprises one or more nucleosides. In some embodiments, the sense strand comprises modification pattern 41S: 5′-snnnNmnNfNfNfNfnnnNmnnnnnnsnsn-3′, wherein “Nf” is a 2′ fluoro-modified nucleoside, “n” is a 2′ O-methyl modified nucleoside, “s” is a phosphorothioate or phosphate linkage, “Nm” is a 2′ O-methoxyethyl modified nucleoside, and N comprises one or more nucleosides. In some embodiments, the Nm is a 2′ O-methoxyethyl modified thymine. In some embodiments, the sense strand comprises modification pattern 42S: 5′-snnnNmnNfNfNfNfnnnNmnnnnnnsnsn-3′, wherein “Nf” is a 2′ fluoro-modified nucleoside, “n” is a 2′ O-methyl modified nucleoside, “s” is a phosphorothioate or phosphate linkage, “Nm” is a 2′ 0-methoxyethyl modified nucleoside, and N comprises one or more nucleosides. In some embodiments, the Nm is a 2′ O-methoxyethyl modified thymine.

[0147] In some embodiments, the composition comprises an oligonucleotide that inhibits the expression of MS4A4E, wherein the oligonucleotide comprises an siRNA comprising a sense strand and an antisense strand, wherein the antisense strand comprises modification pattern 1AS:
[0148] 5′-nsNfsnNfnNfnNfnNfnnnNfnNfnNfnsnsn-3′ (SEQ ID NO:5060), wherein “Nf” is a 2′ fluoro-modified nucleoside, “n” is a 2′ O-methyl modified nucleoside, and “s” is a phosphorothioate or phosphate linkage. In some embodiments, the antisense strand comprises modification pattern 2AS:
[0149] 5′-nsNfsnnnNfnNfNfnnnnNfnNfnnnsnsn-3′ (SEQ ID NO:5061), wherein “Nf” is a 2′ fluoro-modified nucleoside, “n” is a 2′ O-methyl modified nucleoside, and “s” is a phosphorothioate or phosphate linkage. In some embodiments, the antisense strand comprises modification pattern 3AS:
[0150] 5′-nsNfsnnnNfnnnnnnnNfnNfnnnsnsn-3′ (SEQ ID NO:5062), wherein “Nf” is a 2′ fluoro-modified nucleoside, “n” is a 2′ O-methyl modified nucleoside, and “s” is a phosphorothioate or phosphate linkage. In some embodiments, the antisense strand comprises modification pattern 4AS:
[0151] 5′-nsNfsnNfnNfnnnnnnnNfnNfnnnsnsn-3′ (SEQ ID NO:5063), wherein “Nf” is a 2′ fluoro-modified nucleoside, “n” is a 2′ O-methyl modified nucleoside, and “s” is a phosphorothioate or phosphate linkage. In some embodiments, the antisense strand comprises modification pattern 5AS:
[0152] 5′-nsNfsnnnnnnnnnnnNfnNfnnnsnsn-3′ (SEQ ID NO:5064), wherein “Nf” is a 2′ fluoro-modified nucleoside, “n” is a 2′ O-methyl modified nucleoside, and “s” is a phosphorothioate or phosphate linkage. In some embodiments, the antisense strand comprises modification pattern 6AS:
[0153] 5′-nsNfsnnnNfnnNfnnnnNfnNfnnnsnsn-3′ (SEQ ID NO:5065), wherein “Nf” is a 2′ fluoro-modified nucleoside, “n” is a 2′ O-methyl modified nucleoside, and “s” is a phosphorothioate or phosphate linkage. In some embodiments, the antisense strand comprises modification pattern 7AS:
[0154] 5′-nsNfsnNfnNfnNfnNfnNfnNfnNfnNfnsnsn-3′ (SEQ ID NO:5066), wherein “Nf” is a 2′ fluoro-modified nucleoside, “n” is a 2′ O-methyl modified nucleoside, and “s” is a phosphorothioate or phosphate linkage. In some embodiments, the antisense strand comprises modification pattern 8AS:
[0155] 5′-nsNfsnnnnnnnnnnnNfnnnnnsnsn-3′ (SEQ ID NO:5067), wherein “Nf” is a 2′ fluoro-modified nucleoside, “n” is a 2′ O-methyl modified nucleoside, and “s” is a phosphorothioate or phosphate linkage.

[0156] In some embodiments, the composition comprises an oligonucleotide that inhibits the expression of MS4A4E, wherein the oligonucleotide comprises an siRNA comprising a sense strand and an antisense strand, wherein the sense strand comprises pattern 1S and the antisense strand comprises pattern 1AS, 2AS, 3AS, 4AS, 5AS, 6AS, 7AS, or 8AS. In some embodiments, the sense strand comprises pattern 2S and the antisense strand comprises pattern 1AS, 2AS, 3AS, 4AS, 5AS, 6AS, 7AS, or 8AS. In some embodiments, the sense strand comprises pattern 3S and the antisense strand comprises pattern 1AS, 2AS, 3AS, 4AS, 5AS, 6AS, 7AS, or 8AS. In some embodiments, the sense strand comprises pattern 4S and the antisense strand comprises pattern 1AS, 2AS, 3AS, 4AS, 5AS, 6AS, 7AS, or 8AS. In some embodiments, the sense strand comprises pattern 5S and the antisense strand comprises pattern 1AS, 2AS, 3AS, 4AS, 5AS, 6AS, 7AS, or 8AS. In some embodiments, the sense strand comprises pattern 6S and the antisense strand comprises pattern 1AS, 2AS, 3AS, 4AS, 5AS, 6AS, 7AS, or 8AS. In some embodiments, the sense strand comprises pattern 7S and the antisense strand comprises pattern 1AS, 2AS, 3AS, 4AS, 5AS, 6AS, 7AS, or 8AS. In some embodiments, the sense strand comprises pattern 8S and the antisense strand comprises pattern 1AS, 2AS, 3AS, 4AS, 5AS, 6AS, 7AS, or 8AS. In some embodiments, the sense strand comprises pattern 9S and the antisense strand comprises pattern 1AS, 2AS, 3AS, 4AS, 5AS, 6AS, 7AS, or 8AS. In some embodiments, the sense strand comprises pattern 10S and the antisense strand comprises pattern 1AS, 2AS, 3AS, 4AS, 5AS, 6AS, 7AS, or 8AS. In some embodiments, the sense strand comprises pattern 11S and the antisense strand comprises pattern 1AS, 2AS, 3AS, 4AS, 5AS, 6AS, 7AS, or 8AS. In some embodiments, the sense strand comprises pattern 12S and the antisense strand comprises pattern 1AS, 2AS, 3AS, 4AS, 5AS, 6AS, 7AS, or 8AS. In some embodiments, the sense strand comprises pattern 9S and the antisense strand comprises pattern 1AS, 2AS, 3AS, 4AS, 5AS, 6AS, 7AS, or 8AS. In some embodiments, the sense strand comprises pattern 13S and the antisense strand comprises pattern 1AS, 2AS, 3AS, 4AS, 5AS, 6AS, 7AS, or 8AS. In some embodiments, the sense strand comprises pattern 14S and the antisense strand comprises pattern 1AS, 2AS, 3AS, 4AS, 5AS, 6AS, 7AS, or 8AS. In some embodiments, the sense strand comprises pattern 15S and the antisense strand comprises pattern 1AS, 2AS, 3AS, 4AS, 5AS, 6AS, 7AS, or 8AS. In some embodiments, the sense strand comprises pattern 16S and the antisense strand comprises pattern 1AS, 2AS, 3AS, 4AS, 5AS, 6AS, 7AS, or 8AS. In some embodiments, the sense strand comprises pattern 17S and the antisense strand comprises pattern 1AS, 2AS, 3AS, 4AS, 5AS, 6AS, 7AS, or 8AS. In some embodiments, the sense strand comprises pattern 18S and the antisense strand comprises pattern 1AS, 2AS, 3AS, 4AS, 5AS, 6AS, 7AS, or 8AS. In some embodiments, the sense strand comprises pattern 19S and the antisense strand comprises pattern 1AS, 2AS, 3AS, 4AS, 5AS, 6AS, 7AS, or 8AS. In some embodiments, the sense strand comprises pattern 20S and the antisense strand comprises pattern 1AS, 2AS, 3AS, 4AS, 5AS, 6AS, 7AS, or 8AS. In some embodiments, the sense strand comprises pattern 21S and the antisense strand comprises pattern 1AS, 2AS, 3AS, 4AS, 5AS, 6AS, 7AS, or 8AS. In some embodiments, the sense strand comprises pattern 22S and the antisense strand comprises pattern 1AS, 2AS, 3AS, 4AS, 5AS, 6AS, 7AS, or 8AS. In some embodiments, the sense strand comprises pattern 23S and the antisense strand comprises pattern 1AS, 2AS, 3AS, 4AS, 5AS, 6AS, 7AS, or 8AS. In some embodiments, the sense strand comprises pattern 24S and the antisense strand comprises pattern 1AS, 2AS, 3AS, 4AS, 5AS, 6AS, 7AS, or 8AS. In some embodiments, the sense strand comprises pattern 25S and the antisense strand comprises pattern 1AS, 2AS, 3AS, 4AS, 5AS, 6AS, 7AS, or 8AS. In some embodiments, the sense strand comprises pattern 26S and the antisense strand comprises pattern 1AS, 2AS, 3AS, 4AS, 5AS, 6AS, 7AS, or 8AS. In some embodiments, the sense strand comprises pattern 27S and the antisense strand comprises pattern 1AS, 2AS, 3AS, 4AS, 5AS, 6AS, 7AS, or 8AS. In some embodiments, the sense strand comprises pattern 28S and the antisense strand comprises pattern 1AS, 2AS, 3AS, 4AS, 5AS, 6AS, 7AS, or 8AS. In some embodiments, the sense strand comprises pattern 29S and the antisense strand comprises pattern 1AS, 2AS, 3AS, 4AS, 5AS, 6AS, 7AS, or 8AS. In some embodiments, the sense strand comprises pattern 30S and the antisense strand comprises pattern 1AS, 2AS, 3AS, 4AS, 5AS, 6AS, 7AS, or 8AS. In some embodiments, the sense strand comprises pattern 31S and the antisense strand comprises pattern 1AS, 2AS, 3AS, 4AS, 5AS, 6AS, 7AS, or 8AS. In some embodiments, the sense strand comprises pattern 32S and the antisense strand comprises pattern 1AS, 2AS, 3AS, 4AS, 5AS, 6AS, 7AS, or 8AS. In some embodiments, the sense strand comprises pattern 33S and the antisense strand comprises pattern 1AS, 2AS, 3AS, 4AS, 5AS, 6AS, 7AS, or 8AS. In some embodiments, the sense strand comprises pattern 34S and the antisense strand comprises pattern 1AS, 2AS, 3AS, 4AS, 5AS, 6AS, 7AS, or 8AS. In some embodiments, the sense strand comprises pattern 35S and the antisense strand comprises pattern 1AS, 2AS, 3AS, 4AS, 5AS, 6AS, 7AS, or 8AS. In some embodiments, the sense strand comprises pattern 36S and the antisense strand comprises pattern 1AS, 2AS, 3AS, 4AS, 5AS, 6AS, 7AS, or 8AS. In some embodiments, the sense strand comprises pattern 37S and the antisense strand comprises pattern 1AS, 2AS, 3AS, 4AS, 5AS, 6AS, 7AS, or 8AS. In some embodiments, the sense strand comprises pattern 38S and the antisense strand comprises pattern 1AS, 2AS, 3AS, 4AS, 5AS, 6AS, 7AS, or 8AS. In some embodiments, the sense strand comprises pattern 39S and the antisense strand comprises pattern 1AS, 2AS, 3AS, 4AS, 5AS, 6AS, 7AS, or 8AS. In some embodiments, the sense strand comprises pattern 40S and the antisense strand comprises pattern 1AS, 2AS, 3AS, 4AS, 5AS, 6AS, 7AS, or 8AS. In some embodiments, the sense strand comprises pattern 41S and the antisense strand comprises pattern 1AS, 2AS, 3AS, 4AS, 5AS, 6AS, 7AS, or 8AS. In some embodiments, the sense strand comprises pattern 42S and the antisense strand comprises pattern 1AS, 2AS, 3AS, 4AS, 5AS, 6AS, 7AS, or 8AS.

[0157] In some embodiments, the sense strand comprises pattern 1S, 2S, 3S, 4S, 5S, 6S, 7S, 8S, 9S, 10S, 11S, 12S, 13S, 14S, 15S, 16S, 17S, 18S, 19S, 20S, 21S, 22S, 23S, 24S, 25S, 26S, 27S, 28S, 29S, 30S, 31S, 32S, 33S, 34S, 35S, 36S, 37S, 38S, 39S, 40S, 41S, or 42S and the antisense strand comprises pattern 1AS. In some embodiments, the sense strand comprises pattern 1S, 2S, 3S, 4S, 5S, 6S, 7S, 8S, 9S, 10S, 11S, 12S, 13S, 14S, 15S, 16S, 17S, 18S, 19S, 20S, 21S, 22S, 23S, 24S, 25S, 26S, 27S, 28S, 29S, 30S, 31S, 32S, 33S, 34S, 35S, 36S, 37S, 38S, 39S, 40S, 41S, or 42S and the antisense strand comprises pattern 2AS. In some embodiments, the sense strand comprises pattern 1S, 2S, 3S, 4S, 5S, 6S, 7S, 8S, 9S, 10S, 11S, 12S, 13S, 14S, 15S, 16S, 17S, 18S, 19S, 20S, 21S, 22S, 23S, 24S, 25S, 26S, 27S, 28S, 29S, 30S, 31S, 32S, 33S, 34S, 35S, 36S, 37S, 38S, 39S, 40S, 41S, or 42S and the antisense strand comprises pattern 3AS. In some embodiments, the sense strand comprises pattern 1S, 2S, 3S, 4S, 5S, 6S, 7S, 8S, 9S, 10S, 11S, 12S, 13S, 14S, 15S, 16S, 17S, 18S, 19S, 20S, 21S, 22S, 23S, 24S, 25S, 26S, 27S, 28S, 29S, 30S, 31S, 32S, 33S, 34S, 35S, 36S, 37S, 38S, 39S, 40S, 41S, or 42S and the antisense strand comprises pattern 4AS. In some embodiments, the sense strand comprises pattern 1S, 2S, 3S, 4S, 5S, 6S, 7S, 8S, 9S, 10S, 11S, 12S, 13S, 14S, 15S, 16S, 17S, 18S, 19S, 20S, 21S, 22S, 23S, 24S, 25S, 26S, 27S, 28S, 29S, 30S, 31S, 32S, 33S, 34S, 35S, 36S, 37S, 38S, 39S, 40S, 41S, or 42S and the antisense strand comprises pattern 5AS. In some embodiments, the sense strand comprises pattern 1S, 2S, 3S, 4S, 5S, 6S, 7S, 8S, 9S, 10S, 11S, 12S, 13S, 14S, 15S, 16S, 17S, 18S, 19S, 20S, 21S, 22S, 23S, 24S, 25S, 26S, 27S, 28S, 29S, 30S, 31S, 32S, 33S, 34S, 35S, 36S, 37S, 38S, 39S, 40S, 41S, or 42S and the antisense strand comprises pattern 6AS. In some embodiments, the sense strand comprises pattern 1S, 2S, 3S, 4S, 5S, 6S, 7S, 8S, 9S, 10S, 11S, 12S, 13S, 14S, 15S, 16S, 17S, 18S, 19S, 20S, 21S, 22S, 23S, 24S, 25S, 26S, 27S, 28S, 29S, 30S, 31S, 32S, 33S, 34S, 35S, 36S, 37S, 38S, 39S, 40S, 41S, or 42S and the antisense strand comprises pattern 7AS. In some embodiments, the sense strand comprises pattern 1S, 2S, 3S, 4S, 5S, 6S, 7S, 8S, 9S, 10S, 11S, 12S, 13S, 14S, 15S, 16S, 17S, 18S, 19S, 20S, 21S, 22S, 23S, 24S, 25S, 26S, 27S, 28S, 29S, 30S, 31S, 32S, 33S, 34S, 35S, 36S, 37S, 38S, 39S, 40S, 41S, or 42S and the antisense strand comprises pattern 8AS.

[0158] In some embodiments, the sense strand comprises pattern 1S, 2S, 3S, 4S, 5S, 6S, 7S, 8S, 9S, 10S, 11S, 12S, 13S, 14S, 15S, 16S, 17S, 18S, 19S, 20S, 21S, 22S, 23S, 24S, 25S, 26S, 27S, 28S, 29S, 30S, 31S, 32S, 33S, 34S, 35S, 36S, 37S, 38S, 39S, 40S, 41S, or 42S. In some embodiments, the sense strand comprises pattern 1S, 2S, 3S, 4S, 5S, 6S, 7S, 8S, or 9S. In some embodiments, the sense strand comprises modification pattern 1AS, 2AS, 3AS, 4AS, 5AS, 6AS, 7AS, or 8AS. In some embodiments, the antisense strand comprises modification pattern 1AS, 2AS, 3AS, 4AS, 5AS, 6AS, 7AS, or 8AS. In some embodiments, the antisense strand comprises modification pattern 1S, 2S, 3S, 4S, 5S, 6S, 7S, 8S, 9S, 10S, 11S, 12S, 13S, 14S, 15S, 16S, 17S, 18S, 19S, 20S, 21S, 22S, 23S, 24S, 25S, 26S, 27S, 28S, 29S, 30S, 31S, 32S, 33S, 34S, 35S, 36S, 37S, 38S, 39S, 40S, 41S, or 42S. In some embodiments, the sense strand or the antisense strand comprises modification pattern ASO1.

[0159] In some embodiments, purines of the sense strand comprise 2′ fluoro modified purines. In some embodiments, purines of the sense strand comprise 2′-O-methyl modified purines. In some embodiments, purines of the sense strand comprise a mixture of 2′ fluoro and 2′-O-methyl modified purines. In some embodiments, all purines of the sense strand comprise 2′ fluoro modified purines. In some embodiments, all purines of the sense strand comprise 2′-O-methyl modified purines. In some embodiments, all purines of the sense strand comprise a mixture of 2′ fluoro and 2′-O-methyl modified purines.

[0160] In some embodiments, pyrimidines of the sense strand comprise 2′ fluoro modified pyrimidines. In some embodiments, pyrimidines of the sense strand comprise 2′-O-methyl modified pyrimidines. In some embodiments, pyrimidines of the sense strand comprise a mixture of 2′ fluoro and 2′-O-methyl modified pyrimidines. In some embodiments, all pyrimidines of the sense strand comprise 2′ fluoro modified pyrimidines. In some embodiments, all pyrimidines of the sense strand comprise 2′-O— methyl modified pyrimidines. In some embodiments, all pyrimidines of the sense strand comprise a mixture of 2′ fluoro and 2′-O-methyl modified pyrimidines.

[0161] In some embodiments, purines of the sense strand comprise 2′ fluoro modified purines, and pyrimidines of the sense strand comprise a mixture of 2′ fluoro and 2′-O-methyl modified pyrimidines. In some embodiments, purines of the sense strand comprise 2′-O-methyl modified purines, and pyrimidines of the sense strand comprise a mixture of 2′ fluoro and 2′-O-methyl modified pyrimidines. In some embodiments, purines of the sense strand comprise 2′ fluoro modified purines, and pyrimidines of the sense strand comprise 2′-O-methyl modified pyrimidines. In some embodiments, purines of the sense strand comprise 2′-O-methyl modified purines, and pyrimidines of the sense strand comprise 2′ fluoro modified pyrimidines. In some embodiments, pyrimidines of the sense strand comprise 2′ fluoro modified pyrimidines, and purines of the sense strand comprise a mixture of 2′ fluoro and 2′-O-methyl modified purines. In some embodiments, pyrimidines of the sense strand comprise 2′-O-methyl modified pyrimidines, and purines of the sense strand comprise a mixture of 2′ fluoro and 2′-O-methyl modified purines. In some embodiments, pyrimidines of the sense strand comprise 2′ fluoro modified pyrimidines, and purines of the sense strand comprise 2′-O-methyl modified purines. In some embodiments, pyrimidines of the sense strand comprise 2′-O-methyl modified pyrimidines, and purines of the sense strand comprise 2′ fluoro modified purines.

[0162] In some embodiments, all purines of the sense strand comprise 2′ fluoro modified purines, and all pyrimidines of the sense strand comprise a mixture of 2′ fluoro and 2′-O-methyl modified pyrimidines. In some embodiments, all purines of the sense strand comprise 2′-O-methyl modified purines, and all pyrimidines of the sense strand comprise a mixture of 2′ fluoro and 2′-O-methyl modified pyrimidines. In some embodiments, all purines of the sense strand comprise 2′ fluoro modified purines, and all pyrimidines of the sense strand comprise 2′-O-methyl modified pyrimidines. In some embodiments, all purines of the sense strand comprise 2′-O-methyl modified purines, and all pyrimidines of the sense strand comprise 2′ fluoro modified pyrimidines. In some embodiments, all pyrimidines of the sense strand comprise 2′ fluoro modified pyrimidines, and all purines of the sense strand comprise a mixture of 2′ fluoro and 2′-O-methyl modified purines. In some embodiments, all pyrimidines of the sense strand comprise 2′-O-methyl modified pyrimidines, and all purines of the sense strand comprise a mixture of 2′ fluoro and 2′-O-methyl modified purines. In some embodiments, all pyrimidines of the sense strand comprise 2′ fluoro modified pyrimidines, and all purines of the sense strand comprise 2′-O— methyl modified purines. In some embodiments, all pyrimidines of the sense strand comprise 2′-O-methyl modified pyrimidines, and all purines of the sense strand comprise 2′ fluoro modified purines.

[0163] In some embodiments, purines of the antisense strand comprise 2′ fluoro modified purines. In some embodiments, purines of the antisense strand comprise 2′-O-methyl modified purines. In some embodiments, purines of the antisense strand comprise a mixture of 2′ fluoro and 2′-O-methyl modified purines. In some embodiments, all purines of the antisense strand comprise 2′ fluoro modified purines. In some embodiments, all purines of the antisense strand comprise 2′-O-methyl modified purines. In some embodiments, all purines of the antisense strand comprise a mixture of 2′ fluoro and 2′-O-methyl modified purines.

[0164] In some embodiments, pyrimidines of the antisense strand comprise 2′ fluoro modified pyrimidines. In some embodiments, pyrimidines of the antisense strand comprise 2′-O-methyl modified pyrimidines. In some embodiments, pyrimidines of the antisense strand comprise a mixture of 2′ fluoro and 2′-O-methyl modified pyrimidines. In some embodiments, all pyrimidines of the antisense strand comprise 2′ fluoro modified pyrimidines. In some embodiments, all pyrimidines of the antisense strand comprise 2′-O-methyl modified pyrimidines. In some embodiments, all pyrimidines of the antisense strand comprise a mixture of 2′ fluoro and 2′-O-methyl modified pyrimidines.

[0165] In some embodiments, purines of the antisense strand comprise 2′ fluoro modified purines, and pyrimidines of the antisense strand comprise a mixture of 2′ fluoro and 2′-O-methyl modified pyrimidines. In some embodiments, purines of the antisense strand comprise 2′-O-methyl modified purines, and pyrimidines of the antisense strand comprise a mixture of 2′ fluoro and 2′-O-methyl modified pyrimidines. In some embodiments, purines of the antisense strand comprise 2′ fluoro modified purines, and pyrimidines of the antisense strand comprise 2′-O-methyl modified pyrimidines. In some embodiments, purines of the antisense strand comprise 2′-O-methyl modified purines, and pyrimidines of the antisense strand comprise 2′ fluoro modified pyrimidines. In some embodiments, pyrimidines of the antisense strand comprise 2′ fluoro modified pyrimidines, and purines of the antisense strand comprise a mixture of 2′ fluoro and 2′-O-methyl modified purines. In some embodiments, pyrimidines of the antisense strand comprise 2′-O-methyl modified pyrimidines, and purines of the antisense strand comprise a mixture of 2′ fluoro and 2′-O-methyl modified purines. In some embodiments, pyrimidines of the antisense strand comprise 2′ fluoro modified pyrimidines, and purines of the antisense strand comprise 2′-O-methyl modified purines. In some embodiments, pyrimidines of the antisense strand comprise 2′-O— methyl modified pyrimidines, and purines of the antisense strand comprise 2′ fluoro modified purines.

[0166] In some embodiments, all purines of the antisense strand comprise 2′ fluoro modified purines, and all pyrimidines of the antisense strand comprise a mixture of 2′ fluoro and 2′-O-methyl modified pyrimidines. In some embodiments, all purines of the antisense strand comprise 2′-O-methyl modified purines, and all pyrimidines of the antisense strand comprise a mixture of 2′ fluoro and 2′-O-methyl modified pyrimidines. In some embodiments, all purines of the antisense strand comprise 2′ fluoro modified purines, and all pyrimidines of the antisense strand comprise 2′-O-methyl modified pyrimidines. In some embodiments, all purines of the antisense strand comprise 2′-O-methyl modified purines, and all pyrimidines of the antisense strand comprise 2′ fluoro modified pyrimidines. In some embodiments, all pyrimidines of the antisense strand comprise 2′ fluoro modified pyrimidines, and all purines of the antisense strand comprise a mixture of 2′ fluoro and 2′-O-methyl modified purines. In some embodiments, all pyrimidines of the antisense strand comprise 2′-O-methyl modified pyrimidines, and all purines of the antisense strand comprise a mixture of 2′ fluoro and 2′-O-methyl modified purines. In some embodiments, all pyrimidines of the antisense strand comprise 2′ fluoro modified pyrimidines, and all purines of the antisense strand comprise 2′-O-methyl modified purines. In some embodiments, all pyrimidines of the antisense strand comprise 2′-O-methyl modified pyrimidines, and all purines of the antisense strand comprise 2′ fluoro modified purines.

[0167] In some embodiments, the siRNA comprises a sense strand, an antisense strand, and a lipid moiety connected to an end of the sense or antisense strand; wherein the lipid moiety comprises a phenyl or cyclohexanyl linker, wherein the linker is connected to a lipid and to the end of the sense or antisense strand. In some embodiments, any one of the following is true with regard to the sense strand: all purines comprise 2′ fluoro modified purines, and all pyrimidines comprise a mixture of 2′ fluoro and 2′-O-methyl modified pyrimidines; all purines comprise 2′-O-methyl modified purines, and all pyrimidines comprise a mixture of 2′ fluoro and 2′-O-methyl modified pyrimidines; all purines comprise 2′ fluoro modified purines, and all pyrimidines comprise 2′-O-methyl modified pyrimidines; all pyrimidines comprise 2′ fluoro modified pyrimidines, and all purines comprise a mixture of 2′ fluoro and 2′-O-methyl modified purines; all pyrimidines comprise 2′-O-methyl modified pyrimidines, and all purines comprise a mixture of 2′ fluoro and 2′-O-methyl modified purines; or all pyrimidines comprise 2′ fluoro modified pyrimidines, and all purines comprise 2′-O-methyl modified purines. In some embodiments, any one of the following is true with regard to the antisense strand: all purines comprise 2′ fluoro modified purines, and all pyrimidines comprise a mixture of 2′ fluoro and 2′-O-methyl modified pyrimidines; all purines comprise 2′-O-methyl modified purines, and all pyrimidines comprise a mixture of 2′ fluoro and 2′-O— methyl modified pyrimidines; all purines comprise 2′-O-methyl modified purines, and all pyrimidines comprise 2′ fluoro modified pyrimidines; all pyrimidines comprise 2′ fluoro modified pyrimidines, and all purines comprise a mixture of 2′ fluoro and 2′-O-methyl modified purines; all pyrimidines comprise 2′-O-methyl modified pyrimidines, and all purines comprise a mixture of 2′ fluoro and 2′-O-methyl modified purines; or all pyrimidines comprise 2′-O-methyl modified pyrimidines, and all purines comprise 2′ fluoro modified purines. In some embodiments, the siRNA comprises comprising a sense strand and an antisense strand; wherein the antisense strand comprises a 5′ end comprising a vinyl phosphonate and 2 phosphorothioate linkages, and a 3′ end comprising 2 phosphorothioate linkages; wherein the sense strand comprises a 5′ end comprising a hydrophobic moiety, and a 3′ end comprising 2 phosphorothioate linkages; wherein any one of the following is true with regard to the sense strand: all purines comprise 2′ fluoro modified purines, and all pyrimidines comprise a mixture of 2′ fluoro and 2′-O-methyl modified pyrimidines, all purines comprise 2′-O-methyl modified purines, and all pyrimidines comprise a mixture of 2′ fluoro and 2′-O-methyl modified pyrimidines, all purines comprise 2′ fluoro modified purines, and all pyrimidines comprise 2′-O-methyl modified pyrimidines, all pyrimidines comprise 2′ fluoro modified pyrimidines, and all purines comprise a mixture of 2′ fluoro and 2′-O-methyl modified purines, all pyrimidines comprise 2′-O-methyl modified pyrimidines, and all purines comprise a mixture of 2′ fluoro and 2′-O-methyl modified purines, or all pyrimidines comprise 2′ fluoro modified pyrimidines, and all purines comprise 2′-O-methyl modified purines; and wherein any one of the following is true with regard to the antisense strand: all purines comprise 2′ fluoro modified purines, and all pyrimidines comprise a mixture of 2′ fluoro and 2′-O-methyl modified pyrimidines, all purines comprise 2′-O-methyl modified purines, and all pyrimidines comprise a mixture of 2′ fluoro and 2′-O— methyl modified pyrimidines, all purines comprise 2′-O-methyl modified purines, and all pyrimidines comprise 2′ fluoro modified pyrimidines, all pyrimidines comprise 2′ fluoro modified pyrimidines, and all purines comprise a mixture of 2′ fluoro and 2′-O-methyl modified purines, all pyrimidines comprise 2′-O-methyl modified pyrimidines, and all purines comprise a mixture of 2′ fluoro and 2′-O-methyl modified purines, or all pyrimidines comprise 2′-O-methyl modified pyrimidines, and all purines comprise 2′ fluoro modified purines.

[0168] In some embodiments, any one of the following is true with regard to the sense strand: all purines comprise 2′ fluoro modified purines, and all pyrimidines comprise a mixture of 2′ fluoro and 2′-O-methyl modified pyrimidines; all purines comprise 2′-O-methyl modified purines, and all pyrimidines comprise a mixture of 2′ fluoro and 2′-O-methyl modified pyrimidines; all purines comprise 2′ fluoro modified purines, and all pyrimidines comprise 2′-O-methyl modified pyrimidines; all pyrimidines comprise 2′ fluoro modified pyrimidines, and all purines comprise a mixture of 2′ fluoro and 2′-O-methyl modified purines; all pyrimidines comprise 2′-O-methyl modified pyrimidines, and all purines comprise a mixture of 2′ fluoro and 2′-O-methyl modified purines; or all pyrimidines comprise 2′ fluoro modified pyrimidines, and all purines comprise 2′-O-methyl modified purines; with the proviso that in any of the foregoing, the sense strand may include a deoxy nucleoside. In some embodiments, all purines comprise 2′ fluoro modified purines, and all pyrimidines comprise a mixture of 2′ fluoro and 2′-O-methyl modified pyrimidines; with the proviso that a deoxy nucleoside may be included in the sense strand. In some embodiments, in the sense strand, all purines comprise 2′-O-methyl modified purines, and all pyrimidines comprise a mixture of 2′ fluoro and 2′-O-methyl modified pyrimidines; with the proviso that a deoxy nucleoside may be included in the sense strand. In some embodiments, in the sense strand, all purines comprise 2′ fluoro modified purines, and all pyrimidines comprise 2′-O-methyl modified pyrimidines; with the proviso that a deoxy nucleoside may be included in the sense strand. In some embodiments, all pyrimidines comprise 2′ fluoro modified pyrimidines, and all purines comprise a mixture of 2′ fluoro and 2′-O-methyl modified purines; with the proviso that a deoxy nucleoside may be included in the sense strand. In some embodiments, in the sense strand, all pyrimidines comprise 2′-O-methyl modified pyrimidines, and all purines comprise a mixture of 2′ fluoro and 2′-O-methyl modified purines; with the proviso that a deoxy nucleoside may be included in the sense strand. In some embodiments, in the sense strand, all pyrimidines comprise 2′ fluoro modified pyrimidines, and all purines comprise 2′-O-methyl modified purines; with the proviso that a deoxy nucleoside may be included in the sense strand. In some embodiments, the sense strand includes the deoxy nucleoside. The deoxy nucleoside may be at nucleoside position 9 of the sense strand. In some embodiments, the sense strand does not include a deoxy nucleoside. The deoxy nucleoside of the sense strand may be otherwise unmodified.

[0169] In some embodiments, any one of the following is true with regard to the antisense strand: all purines comprise 2′ fluoro modified purines, and all pyrimidines comprise a mixture of 2′ fluoro and 2′-O-methyl modified pyrimidines; all purines comprise 2′-O-methyl modified purines, and all pyrimidines comprise a mixture of 2′ fluoro and 2′-O-methyl modified pyrimidines; all purines comprise 2′-O-methyl modified purines, and all pyrimidines comprise 2′ fluoro modified pyrimidines; all pyrimidines comprise 2′ fluoro modified pyrimidines, and all purines comprise a mixture of 2′ fluoro and 2′-O-methyl modified purines; all pyrimidines comprise 2′-O-methyl modified pyrimidines, and all purines comprise a mixture of 2′ fluoro and 2′-O-methyl modified purines; or all pyrimidines comprise 2′-O-methyl modified pyrimidines, and all purines comprise 2′ fluoro modified purines; with the proviso that in any of the foregoing, the sense strand may include a deoxy nucleoside. In some embodiments, all purines comprise 2′ fluoro modified purines, and all pyrimidines comprise a mixture of 2′ fluoro and 2′-O-methyl modified pyrimidines; with the proviso that a deoxy nucleoside may be included in the antisense strand. In some embodiments, in the antisense strand, all purines comprise 2′-O-methyl modified purines, and all pyrimidines comprise a mixture of 2′ fluoro and 2′-O-methyl modified pyrimidines; with the proviso that a deoxy nucleoside may be included in the antisense strand. In some embodiments, in the antisense strand, all purines comprise 2′-O-methyl modified purines, and all pyrimidines comprise 2′ fluoro modified pyrimidines; with the proviso that a deoxy nucleoside may be included in the antisense strand. In some embodiments, in the antisense strand, all pyrimidines comprise 2′ fluoro modified pyrimidines, and all purines comprise a mixture of 2′ fluoro and 2′-O-methyl modified purines; with the proviso that a deoxy nucleoside may be included in the antisense strand. In some embodiments, in the antisense strand, all pyrimidines comprise 2′-O-methyl modified pyrimidines, and all purines comprise a mixture of 2′ fluoro and 2′-O-methyl modified purines; with the proviso that a deoxy nucleoside may be included in the antisense strand. In some embodiments, in the antisense strand, all pyrimidines comprise 2′-O-methyl modified pyrimidines, and all purines comprise 2′ fluoro modified purines; with the proviso that a deoxy nucleoside may be included in the antisense strand. In some embodiments, the antisense strand includes the deoxy nucleoside. The deoxy nucleoside may be at nucleoside position 9 of the antisense strand. In some embodiments, the antisense strand does not include a deoxy nucleoside. The deoxy nucleoside of the antisense strand may be otherwise unmodified.

[0170] In some embodiments, any one of the following is true with regard to the sense strand: all purines comprise 2′ fluoro modified purines, and all pyrimidines comprise a mixture of 2′ fluoro and 2′-O-methyl modified pyrimidines; all purines comprise 2′-O-methyl modified purines, and all pyrimidines comprise a mixture of 2′ fluoro and 2′-O-methyl modified pyrimidines; all purines comprise 2′ fluoro modified purines, and all pyrimidines comprise 2′-O-methyl modified pyrimidines; all pyrimidines comprise 2′ fluoro modified pyrimidines, and all purines comprise a mixture of 2′ fluoro and 2′-O-methyl modified purines; all pyrimidines comprise 2′-O-methyl modified pyrimidines, and all purines comprise a mixture of 2′ fluoro and 2′-O-methyl modified purines; or all pyrimidines comprise 2′ fluoro modified pyrimidines, and all purines comprise 2′-O-methyl modified purines; with the proviso that in any of the foregoing, the sense strand may include a deoxy nucleoside or a 2′-O-methoxyethyl nucleoside. In some embodiments, all purines comprise 2′ fluoro modified purines, and all pyrimidines comprise a mixture of 2′ fluoro and 2′-O-methyl modified pyrimidines; with the proviso that a deoxy nucleoside or a 2′-O— methoxyethyl nucleoside may be included in the sense strand. In some embodiments, in the sense strand, all purines comprise 2′-O-methyl modified purines, and all pyrimidines comprise a mixture of 2′ fluoro and 2′-O-methyl modified pyrimidines; with the proviso that a deoxy nucleoside or a 2′-O-methoxyethyl nucleoside may be included in the sense strand. In some embodiments, in the sense strand, all purines comprise 2′ fluoro modified purines, and all pyrimidines comprise 2′-O-methyl modified pyrimidines; with the proviso that a deoxy nucleoside or a 2′-O-methoxyethyl nucleoside may be included in the sense strand. In some embodiments, all pyrimidines comprise 2′ fluoro modified pyrimidines, and all purines comprise a mixture of 2′ fluoro and 2′-O-methyl modified purines; with the proviso that a deoxy nucleoside or a 2′-O-methoxyethyl nucleoside may be included in the sense strand. In some embodiments, in the sense strand, all pyrimidines comprise 2′-O-methyl modified pyrimidines, and all purines comprise a mixture of 2′ fluoro and 2′-O-methyl modified purines; with the proviso that a deoxy nucleoside or a 2′-O-methoxyethyl nucleoside may be included in the sense strand. In some embodiments, in the sense strand, all pyrimidines comprise 2′ fluoro modified pyrimidines, and all purines comprise 2′-O-methyl modified purines; with the proviso that a deoxy nucleoside or a 2′-O-methoxyethyl nucleoside may be included in the sense strand. In some embodiments, the sense strand includes the deoxy nucleoside. The deoxy nucleoside may be at nucleoside position 9 of the sense strand. In some embodiments, the sense strand does not include a deoxy nucleoside. The deoxy nucleoside of the sense strand may be otherwise unmodified. In some embodiments, the sense strand includes the a 2′-O-methoxyethyl nucleoside. The 2′-O-methoxyethyl nucleoside may be at nucleoside position 4 of the sense strand. The 2′-O-methoxyethyl nucleoside may include a 2′-O-methoxyethyl thymine nucleoside. In some embodiments, the sense strand does not include the a 2′-O-methoxyethyl nucleoside. The 2′-O-methoxyethyl nucleoside of the sense strand may be otherwise unmodified.

[0171] In some embodiments, any one of the following is true with regard to the antisense strand: all purines comprise 2′ fluoro modified purines, and all pyrimidines comprise a mixture of 2′ fluoro and 2′-O-methyl modified pyrimidines; all purines comprise 2′-O-methyl modified purines, and all pyrimidines comprise a mixture of 2′ fluoro and 2′-O-methyl modified pyrimidines; all purines comprise 2′-O-methyl modified purines, and all pyrimidines comprise 2′ fluoro modified pyrimidines; all pyrimidines comprise 2′ fluoro modified pyrimidines, and all purines comprise a mixture of 2′ fluoro and 2′-O-methyl modified purines; all pyrimidines comprise 2′-O-methyl modified pyrimidines, and all purines comprise a mixture of 2′ fluoro and 2′-O-methyl modified purines; or all pyrimidines comprise 2′-O-methyl modified pyrimidines, and all purines comprise 2′ fluoro modified purines; with the proviso that in any of the foregoing, the sense strand may include a deoxy nucleoside or a 2′-O-methoxyethyl nucleoside. In some embodiments, all purines comprise 2′ fluoro modified purines, and all pyrimidines comprise a mixture of 2′ fluoro and 2′-O-methyl modified pyrimidines; with the proviso that a deoxy nucleoside or a 2′-O— methoxyethyl nucleoside may be included in the antisense strand. In some embodiments, in the antisense strand, all purines comprise 2′-O-methyl modified purines, and all pyrimidines comprise a mixture of 2′ fluoro and 2′-O-methyl modified pyrimidines; with the proviso that a deoxy nucleoside or a 2′-O— methoxyethyl nucleoside may be included in the antisense strand. In some embodiments, in the antisense strand, all purines comprise 2′-O-methyl modified purines, and all pyrimidines comprise 2′ fluoro modified pyrimidines; with the proviso that a deoxy nucleoside or a 2′-O-methoxyethyl nucleoside may be included in the antisense strand. In some embodiments, in the antisense strand, all pyrimidines comprise 2′ fluoro modified pyrimidines, and all purines comprise a mixture of 2′ fluoro and 2′-O-methyl modified purines; with the proviso that a deoxy nucleoside or a 2′-O-methoxyethyl nucleoside may be included in the antisense strand. In some embodiments, in the antisense strand, all pyrimidines comprise 2′-O-methyl modified pyrimidines, and all purines comprise a mixture of 2′ fluoro and 2′-O-methyl modified purines; with the proviso that a deoxy nucleoside or a 2′-O-methoxyethyl nucleoside may be included in the antisense strand. In some embodiments, in the antisense strand, all pyrimidines comprise 2′-O-methyl modified pyrimidines, and all purines comprise 2′ fluoro modified purines; with the proviso that a deoxy nucleoside or a 2′-O-methoxyethyl nucleoside may be included in the antisense strand. In some embodiments, the antisense strand includes the deoxy nucleoside. The deoxy nucleoside may be at nucleoside position 9 of the antisense strand. In some embodiments, the antisense strand does not include a deoxy nucleoside. The deoxy nucleoside of the antisense strand may be otherwise unmodified. In some embodiments, the antisense strand includes the a 2′-O-methoxyethyl nucleoside. The 2′-O-methoxyethyl nucleoside may be at nucleoside position 4 of the sense strand. The 2′-O-methoxyethyl nucleoside may include a 2′-O-methoxyethyl thymine nucleoside. In some embodiments, the antisense strand does not include the a 2′-O-methoxyethyl nucleoside. The 2′-O-methoxyethyl nucleoside of the antisense strand may be otherwise unmodified.

[0172] In some embodiments, any one of the following is true with regard to the sense strand: all purines comprise 2′ fluoro modified purines, and all pyrimidines comprise a mixture of 2′ fluoro and 2′-O-methyl modified pyrimidines; all purines comprise 2′-O-methyl modified purines, and all pyrimidines comprise a mixture of 2′ fluoro and 2′-O-methyl modified pyrimidines; all purines comprise 2′ fluoro modified purines, and all pyrimidines comprise 2′-O-methyl modified pyrimidines; all pyrimidines comprise 2′ fluoro modified pyrimidines, and all purines comprise a mixture of 2′ fluoro and 2′-O-methyl modified purines; all pyrimidines comprise 2′-O-methyl modified pyrimidines, and all purines comprise a mixture of 2′ fluoro and 2′-O-methyl modified purines; or all pyrimidines comprise 2′ fluoro modified pyrimidines, and all purines comprise 2′-O-methyl modified purines; with the proviso that in any of the foregoing, the sense strand may include a 2′-O-methoxyethyl nucleoside. In some embodiments, all purines comprise 2′ fluoro modified purines, and all pyrimidines comprise a mixture of 2′ fluoro and 2′-O-methyl modified pyrimidines; with the proviso that a 2′-O-methoxyethyl nucleoside may be included in the sense strand. In some embodiments, in the sense strand, all purines comprise 2′-O-methyl modified purines, and all pyrimidines comprise a mixture of 2′ fluoro and 2′-O-methyl modified pyrimidines; with the proviso that a 2′-O-methoxyethyl nucleoside may be included in the sense strand. In some embodiments, in the sense strand, all purines comprise 2′ fluoro modified purines, and all pyrimidines comprise 2′-O-methyl modified pyrimidines; with the proviso that a 2′-O-methoxyethyl nucleoside may be included in the sense strand. In some embodiments, all pyrimidines comprise 2′ fluoro modified pyrimidines, and all purines comprise a mixture of 2′ fluoro and 2′-O-methyl modified purines; with the proviso that a 2′-O-methoxyethyl nucleoside may be included in the sense strand. In some embodiments, in the sense strand, all pyrimidines comprise 2′-O-methyl modified pyrimidines, and all purines comprise a mixture of 2′ fluoro and 2′-O-methyl modified purines; with the proviso that a 2′-O-methoxyethyl nucleoside may be included in the sense strand. In some embodiments, in the sense strand, all pyrimidines comprise 2′ fluoro modified pyrimidines, and all purines comprise 2′-O-methyl modified purines; with the proviso that a 2′-O-methoxyethyl nucleoside may be included in the sense strand. In some embodiments, the sense strand includes a 2′-O-methoxyethyl nucleoside. The 2′-O-methoxyethyl nucleoside may be at nucleoside position 4 of the sense strand. The 2′-O-methoxyethyl nucleoside may include a 2′-O-methoxyethyl thymine nucleoside. In some embodiments, the sense strand does not include a 2′-O-methoxyethyl nucleoside. The 2′-O-methoxyethyl nucleoside of the sense strand may be otherwise unmodified.

[0173] In some embodiments, any one of the following is true with regard to the antisense strand: all purines comprise 2′ fluoro modified purines, and all pyrimidines comprise a mixture of 2′ fluoro and 2′-O-methyl modified pyrimidines; all purines comprise 2′-O-methyl modified purines, and all pyrimidines comprise a mixture of 2′ fluoro and 2′-O-methyl modified pyrimidines; all purines comprise 2′-O-methyl modified purines, and all pyrimidines comprise 2′ fluoro modified pyrimidines; all pyrimidines comprise 2′ fluoro modified pyrimidines, and all purines comprise a mixture of 2′ fluoro and 2′-O-methyl modified purines; all pyrimidines comprise 2′-O-methyl modified pyrimidines, and all purines comprise a mixture of 2′ fluoro and 2′-O-methyl modified purines; or all pyrimidines comprise 2′-O-methyl modified pyrimidines, and all purines comprise 2′ fluoro modified purines; with the proviso that in any of the foregoing, the sense strand may include a deoxy nucleoside or a 2′-O-methoxyethyl nucleoside. In some embodiments, all purines comprise 2′ fluoro modified purines, and all pyrimidines comprise a mixture of 2′ fluoro and 2′-O-methyl modified pyrimidines; with the proviso that a 2′-O-methoxyethyl nucleoside may be included in the antisense strand. In some embodiments, in the antisense strand, all purines comprise 2′-O-methyl modified purines, and all pyrimidines comprise a mixture of 2′ fluoro and 2′-O— methyl modified pyrimidines; with the proviso that a 2′-O-methoxyethyl nucleoside may be included in the antisense strand. In some embodiments, in the antisense strand, all purines comprise 2′-O-methyl modified purines, and all pyrimidines comprise 2′ fluoro modified pyrimidines; with the proviso that a 2′-O-methoxyethyl nucleoside may be included in the antisense strand. In some embodiments, in the antisense strand, all pyrimidines comprise 2′ fluoro modified pyrimidines, and all purines comprise a mixture of 2′ fluoro and 2′-O-methyl modified purines; with the proviso that a 2′-O-methoxyethyl nucleoside may be included in the antisense strand. In some embodiments, in the antisense strand, all pyrimidines comprise 2′-O-methyl modified pyrimidines, and all purines comprise a mixture of 2′ fluoro and 2′-O-methyl modified purines; with the proviso that a 2′-O-methoxyethyl nucleoside may be included in the antisense strand. In some embodiments, in the antisense strand, all pyrimidines comprise 2′-O-methyl modified pyrimidines, and all purines comprise 2′ fluoro modified purines; with the proviso that a 2′-O-methoxyethyl nucleoside may be included in the antisense strand. In some embodiments, the antisense strand includes a 2′-O-methoxyethyl nucleoside. The 2′-O-methoxyethyl nucleoside may be at nucleoside position 4 of the sense strand. The 2′-O-methoxyethyl nucleoside may include a 2′-O— methoxyethyl thymine nucleoside. In some embodiments, the antisense strand does not include a 2′-O— methoxyethyl nucleoside. The 2′-O-methoxyethyl nucleoside of the antisense strand may be otherwise unmodified.

[0174] In some embodiments, any one of the following is true with regard to the sense strand, with the proviso that the sense strand may include a 2′ deoxy nucleoside: all purine nucleosides comprise 2′ fluoro, and all pyrimidine nucleosides are modified with a mixture of 2′ fluoro and 2′-O-methyl, all purine nucleosides comprise 2′-O-methyl, and all pyrimidine nucleosides are modified with a mixture of 2′ fluoro and 2′-O-methyl, all purine nucleosides comprise 2′ fluoro, and all pyrimidine nucleosides comprise 2′-O-methyl, all pyrimidine nucleosides comprise 2′ fluoro, and all purine nucleosides are modified with a mixture of 2′ fluoro and 2′-O-methyl, all pyrimidine nucleosides comprise 2′-O-methyl, and all purine nucleosides are modified with a mixture of 2′ fluoro and 2′-O-methyl, or all pyrimidine nucleosides comprise 2′ fluoro, and all purine nucleosides comprise 2′-O-methyl. In some embodiments, in the sense strand, all purine nucleosides comprise 2′ fluoro, and all pyrimidine nucleosides are modified with a mixture of 2′ fluoro and 2′-O-methyl, with the proviso that the sense strand may include a 2′ deoxy nucleoside. In some embodiments, in the sense strand, all purine nucleosides comprise 2′-O-methyl, and all pyrimidine nucleosides are modified with a mixture of 2′ fluoro and 2′-O-methyl, with the proviso that the sense strand may include a 2′ deoxy nucleoside. In some embodiments, in the sense strand, all purine nucleosides comprise 2′ fluoro, and all pyrimidine nucleosides comprise 2′-O-methyl, with the proviso that the sense strand may include a 2′ deoxy nucleoside. In some embodiments, in the sense strand, all pyrimidine nucleosides comprise 2′ fluoro, and all purine nucleosides are modified with a mixture of 2′ fluoro and 2′-O-methyl, with the proviso that the sense strand may include a 2′ deoxy nucleoside. In some embodiments, in the sense strand, all pyrimidine nucleosides comprise 2′-O-methyl, and all purine nucleosides are modified with a mixture of 2′ fluoro and 2′-O-methyl, with the proviso that the sense strand may include a 2′ deoxy nucleoside. In some embodiments, in the sense strand, all pyrimidine nucleosides comprise 2′ fluoro, and all purine nucleosides comprise 2′-O-methyl, with the proviso that the sense strand may include a 2′ deoxy nucleoside. In some embodiments, the sense strand includes the 2′ deoxy nucleoside. In some embodiments, the sense strand does not include the 2′ deoxy nucleoside. Some embodiments include a proviso that the sense strand may include a 2′-O-methoxyethyl nucleoside (e.g. at position 4, counting from 5′ to 3′). Some embodiments include the 2′-O-methoxyethyl nucleoside in the sense strand. Some embodiments do not include the 2′-O-methoxyethyl nucleoside in the sense strand.

[0175] In some embodiments, any one of the following is true with regard to the sense strand: all purine nucleosides comprise 2′ fluoro, and all pyrimidine nucleosides are modified with a mixture of 2′ fluoro and 2′-O-methyl, all purine nucleosides comprise 2′-O-methyl, and all pyrimidine nucleosides are modified with a mixture of 2′ fluoro and 2′-O-methyl, all purine nucleosides comprise 2′ fluoro, and all pyrimidine nucleosides comprise 2′-O-methyl, all pyrimidine nucleosides comprise 2′ fluoro, and all purine nucleosides are modified with a mixture of 2′ fluoro and 2′-O-methyl, all pyrimidine nucleosides comprise 2′-O-methyl, and all purine nucleosides are modified with a mixture of 2′ fluoro and 2′-O— methyl, or all pyrimidine nucleosides comprise 2′ fluoro, and all purine nucleosides comprise 2′-O— methyl. In some embodiments, in the sense strand, all purine nucleosides comprise 2′ fluoro, and all pyrimidine nucleosides are modified with a mixture of 2′ fluoro and 2′-O-methyl. In some embodiments, in the sense strand, all purine nucleosides comprise 2′-O-methyl, and all pyrimidine nucleosides are modified with a mixture of 2′ fluoro and 2′-O-methyl. In some embodiments, in the sense strand, all purine nucleosides comprise 2′ fluoro, and all pyrimidine nucleosides comprise 2′-O-methyl. In some embodiments, in the sense strand, all pyrimidine nucleosides comprise 2′ fluoro, and all purine nucleosides are modified with a mixture of 2′ fluoro and 2′-O-methyl. In some embodiments, in the sense strand, all pyrimidine nucleosides comprise 2′-O-methyl, and all purine nucleosides are modified with a mixture of 2′ fluoro and 2′-O-methyl. In some embodiments, in the sense strand, all pyrimidine nucleosides comprise 2′ fluoro, and all purine nucleosides comprise 2′-O-methyl. Some embodiments include a proviso that the sense strand may include a 2′-O-methoxyethyl nucleoside (e.g. at position 4, counting from 5′ to 3′). Some embodiments include the 2′-O-methoxyethyl nucleoside in the sense strand. Some embodiments do not include the 2′-O-methoxyethyl nucleoside in the sense strand.

[0176] In some embodiments, any one of the following is true with regard to the antisense strand, with the proviso that the antisense strand may include a 2′ deoxy nucleoside: all purine nucleosides comprise 2′ fluoro, and all pyrimidine nucleosides are modified with a mixture of 2′ fluoro and 2′-O— methyl, all purine nucleosides comprise 2′-O-methyl, and all pyrimidine nucleosides are modified with a mixture of 2′ fluoro and 2′-O-methyl, all purine nucleosides comprise 2′-O-methyl, and all pyrimidine nucleosides comprise 2′ fluoro, all pyrimidine nucleosides comprise 2′ fluoro, and all purine nucleosides are modified with a mixture of 2′ fluoro and 2′-O-methyl, all pyrimidine nucleosides comprise 2′-O— methyl, and all purine nucleosides are modified with a mixture of 2′ fluoro and 2′-O-methyl, or all pyrimidine nucleosides comprise 2′-O-methyl, and all purine nucleosides comprise 2′ fluoro. In some embodiments, in the antisense strand, all purine nucleosides comprise 2′ fluoro, and all pyrimidine nucleosides are modified with a mixture of 2′ fluoro and 2′-O-methyl, with the proviso that the antisense strand may include a 2′ deoxy nucleoside. In some embodiments, in the antisense strand, all purine nucleosides comprise 2′-O-methyl, and all pyrimidine nucleosides are modified with a mixture of 2′ fluoro and 2′-O-methyl, with the proviso that the antisense strand may include a 2′ deoxy nucleoside. In some embodiments, in the antisense strand, all purine nucleosides comprise 2′ fluoro, and all pyrimidine nucleosides comprise 2′-O-methyl, with the proviso that the antisense strand may include a 2′ deoxy nucleoside. In some embodiments, in the antisense strand, all pyrimidine nucleosides comprise 2′ fluoro, and all purine nucleosides are modified with a mixture of 2′ fluoro and 2′-O-methyl, with the proviso that the antisense strand may include a 2′ deoxy nucleoside. In some embodiments, in the antisense strand, all pyrimidine nucleosides comprise 2′-O-methyl, and all purine nucleosides are modified with a mixture of 2′ fluoro and 2′-O-methyl, with the proviso that the antisense strand may include a 2′ deoxy nucleoside. In some embodiments, in the antisense strand, all pyrimidine nucleosides comprise 2′ fluoro, and all purine nucleosides comprise 2′-O-methyl, with the proviso that the antisense strand may include a 2′ deoxy nucleoside. In some embodiments, the antisense strand includes the 2′ deoxy nucleoside. In some embodiments, the antisense strand does not include the 2′ deoxy nucleoside. Some embodiments include a proviso that the antisense strand may include a 2′-O-methoxyethyl nucleoside (e.g. at position 4, counting from 5′ to 3′). Some embodiments include the 2′-O-methoxyethyl nucleoside in the antisense strand. Some embodiments do not include the 2′-O-methoxyethyl nucleoside in the antisense strand.

[0177] In some embodiments, any one of the following is true with regard to the antisense strand: all purine nucleosides comprise 2′ fluoro, and all pyrimidine nucleosides are modified with a mixture of 2′ fluoro and 2′-O-methyl, all purine nucleosides comprise 2′-O-methyl, and all pyrimidine nucleosides are modified with a mixture of 2′ fluoro and 2′-O-methyl, all purine nucleosides comprise 2′-O-methyl, and all pyrimidine nucleosides comprise 2′ fluoro, all pyrimidine nucleosides comprise 2′ fluoro, and all purine nucleosides are modified with a mixture of 2′ fluoro and 2′-O-methyl, all pyrimidine nucleosides comprise 2′-O-methyl, and all purine nucleosides are modified with a mixture of 2′ fluoro and 2′-O— methyl, or all pyrimidine nucleosides comprise 2′-O-methyl, and all purine nucleosides comprise 2′ fluoro. In some embodiments, in the antisense strand, all purine nucleosides comprise 2′ fluoro, and all pyrimidine nucleosides are modified with a mixture of 2′ fluoro and 2′-O-methyl. In some embodiments, in the antisense strand, all purine nucleosides comprise 2′-O-methyl, and all pyrimidine nucleosides are modified with a mixture of 2′ fluoro and 2′-O-methyl. In some embodiments, in the antisense strand, all purine nucleosides comprise 2′ fluoro, and all pyrimidine nucleosides comprise 2′-O-methyl. In some embodiments, in the antisense strand, all pyrimidine nucleosides comprise 2′ fluoro, and all purine nucleosides are modified with a mixture of 2′ fluoro and 2′-O-methyl. In some embodiments, in the antisense strand, all pyrimidine nucleosides comprise 2′-O-methyl, and all purine nucleosides are modified with a mixture of 2′ fluoro and 2′-O-methyl. In some embodiments, in the antisense strand, all pyrimidine nucleosides comprise 2′ fluoro, and all purine nucleosides comprise 2′-O-methyl. Some embodiments include a proviso that the antisense strand may include a 2′-O-methoxyethyl nucleoside (e.g. at position 4, counting from 5′ to 3′). Some embodiments include the 2′-O-methoxyethyl nucleoside in the antisense strand. Some embodiments do not include the 2′-O-methoxyethyl nucleoside in the antisense strand.

[0178] In some embodiments, the antisense strand comprises one or two 3′ phosphorothioate linkages. For example, there may be a phosphorothioate linkage between the first and second nucleotides from the 3′ end of the antisense strand, or there may be phosphorothioate linkages between the first, second and third nucleotides from the 3′ end of the antisense strand. In some embodiments, the sense strand comprises one or two 5′ phosphorothioate linkages. For example, there may be a phosphorothioate linkage between the first and second nucleotides from the 5′ end of the sense strand, or there may be phosphorothioate linkages between the first, second and third nucleotides from the 5′ end of the sense strand. In some embodiments, the sense strand does not comprise one or two 5′ phosphorothioate linkages. For example, in some embodiments, there are no phosphorothioate linkages between the last 3 nucleotides at the 5′ end of the sense strand. In some embodiments, the sense strand comprises 5′ phosphate linkages. In some embodiments, the sense strand comprises one or two 3′ phosphorothioate linkages. For example, there may be a phosphorothioate linkage between the first and second nucleotides from the 3′ end of the sense strand, or there may be phosphorothioate linkages between the first, second and third nucleotides from the 3′ end of the sense strand.

[0179] In some embodiments, the antisense strand comprises a 5′ end comprising 2 phosphorothioate linkages. The 5′ end may comprise 3 nucleosides separated by the 2 phosphorothioate linkages. In some embodiments, the antisense strand comprises a 3′ end comprising 2 phosphorothioate linkages. The 3′ end may comprise 3 nucleosides separated by the 2 phosphorothioate linkages.

[0180] Disclosed herein, in some embodiments, are modified oligonucleotides. The modified oligonucleotide may be an siRNA that includes modifications to the ribose rings, and phosphate linkages. The modifications may be in particular patterns that maximize cell delivery, stability, and efficiency. The siRNA may also include a vinyl phosphonate and a hydrophobic group. These modifications may aid in delivery to a cell or tissue within a subject. The modified oligonucleotide may be used in a method such as a treatment method or a method of reducing gene expression.

[0181] In some embodiments, the oligonucleotide comprises a duplex consisting of 21 nucleotide single strands with base pairing between 19 of the base pairs. In some embodiments, the duplex comprises single-stranded 2 nucleotide overhangs are at the 3′ ends of each strand. One strand (antisense strand) is complementary to a MS4A4E mRNA. Each end of the antisense strand has one to two phosphorothioate bonds. The 5′ end has an optional phosphate mimic such as a vinyl phosphonate. In some embodiments, the oligonucleotide is used to knock down a MS4A4E mRNA or a target protein. In some embodiments, the sense strand has the same sequence as the MS4A4E mRNA. In some embodiments, there are 1-2 phosphorothioates at the 3′ end. In some embodiments, there are 1 or no phosphorothioates at the 5′ end. In some embodiments, there is a hydrophobic conjugate of 12 to 25 carbons attached at the 5′ end via a phosphodiester bond.

[0182] Disclosed herein, in some embodiments are compositions comprising an oligonucleotide that targets MS4A4E and when administered to a cell decreases expression of MS4A4E, wherein the oligonucleotide comprises a small interfering RNA (siRNA) comprising a sense strand and an antisense strand, wherein the sense strand comprises a sense strand sequence described herein in which at least one internucleoside linkage is modified and at least one nucleoside is modified, or an sense strand sequence comprising 1 or 2 nucleoside substitutions, additions, or deletions of the oligonucleotide sequence in which at least one internucleoside linkage is modified and at least one nucleoside is modified, and wherein the antisense strand comprises an antisense strand sequence described herein in which at least one internucleoside linkage is modified and at least one nucleoside is modified, or an oligonucleotide sequence comprising 1 or 2 nucleoside substitutions, additions, or deletions of the antisense strand sequence in which at least one internucleoside linkage is modified and at least one nucleoside is modified. Some embodiments relate to methods that include administering the composition to a subject.

[0183] In some embodiments, the siRNA comprises a sense strand having a sequence in accordance with any of SEQ ID NOs: 4895-4915. In some embodiments, the sense strand sequence comprises or consists of sequence at least 75% identical to any one of SEQ ID NOs: 4895-4915, at least 80% identical to any one of SEQ ID NOs: 4895-4915, at least 85% identical to of any one of SEQ ID NOs: 4895-4915, at least 90% identical to any one of SEQ ID NOs: 4895-4915, or at least 95% identical to any one of SEQ ID NOs: 4895-4915. In some embodiments, the sense strand sequence comprises or consists of the sequence of any one of SEQ ID NOs: 4895-4915, or a sense strand sequence thereof having 1, 2, 3, or 4 nucleoside substitutions, additions, or deletions. In some embodiments, the sense strand sequence comprises or consists of the sequence of any one of SEQ ID NOs: 4895-4915, or a sense strand sequence thereof having 1 or 2 nucleoside substitutions, additions, or deletions. In some embodiments, the sense strand sequence comprises or consists of a sequence 100% identical to SEQ ID NOs: 4895-4915. The sense strand sequence may include the first 5, 6, 7, 8, 9, 10, 11, 12, 13, 14, 15, 16, 17, 18, or 19 nucleotides (in the 5′ to 3′ direction) of any of the aforementioned sequences. The sense strand sequence may include the first 19 nucleotides of any of the aforementioned sequences. The sense strand sequence may include the last 5, 6, 7, 8, 9, 10, 11, 12, 13, 14, 15, 16, 17, 18, or 19 nucleotides (in the 5′ to 3′ direction) of any of the aforementioned sequences. The sense strand may comprise an overhang. The sense strand may comprise a modification pattern described herein, such as a different set of modifications or modification pattern than the aforementioned sequences. The sense strand may comprise a lipid moiety. The sense strand may comprise a GalNAc moiety.

[0184] In some embodiments, the siRNA comprises an antisense strand having a sequence in accordance with any of SEQ ID NOs: 4916-4936. In some embodiments, the antisense strand sequence comprises or consists of sequence at least 75% identical to any one of SEQ ID NOs: 4916-4936, at least 80% identical to any one of SEQ ID NOs: 4916-4936, at least 85% identical to of any one of SEQ ID NOs: 4916-4936, at least 90% identical to any one of SEQ ID NOs: 4916-4936, or at least 95% identical to any one of SEQ ID NOs: 4916-4936. In some embodiments, the antisense strand sequence comprises or consists of the sequence of any one of SEQ ID NOs: 4916-4936, or an antisense strand sequence thereof having 1, 2, 3, or 4 nucleoside substitutions, additions, or deletions. In some embodiments, the antisense strand sequence comprises or consists of the sequence of any one of SEQ ID NOs: 4916-4936, or an antisense strand sequence thereof having 1 or 2 nucleoside substitutions, additions, or deletions. In some embodiments, the antisense strand sequence comprises or consists of a sequence 100% identical to SEQ ID NOs: 4916-4936. The antisense strand sequence may include the first 5, 6, 7, 8, 9, 10, 11, 12, 13, 14, 15, 16, 17, 18, or 19 nucleotides (in the 5′ to 3′ direction) of any of the aforementioned sequences. The antisense strand sequence may include the first 19 nucleotides of any of the aforementioned sequences. The antisense strand sequence may include the last 5, 6, 7, 8, 9, 10, 11, 12, 13, 14, 15, 16, 17, 18, or 19 nucleotides (in the 5′ to 3′ direction) of any of the aforementioned sequences. The antisense strand may comprise an overhang. The antisense strand may comprise a modification pattern described herein, such as a different set of modifications or modification pattern than the aforementioned sequences. The antisense strand may comprise a lipid moiety or a GalNAc moiety.

[0185] In some embodiments, the siRNA comprises a sense strand having a sequence in accordance with any of SEQ ID NOs: 4937-5020. In some embodiments, the sense strand sequence comprises or consists of sequence at least 75% identical to any one of SEQ ID NOs: 4937-5020, at least 80% identical to any one of SEQ ID NOs: 4937-5020, at least 85% identical to of any one of SEQ ID NOs: 4937-5020, at least 90% identical to any one of SEQ ID NOs: 4937-5020, or at least 95% identical to any one of SEQ ID NOs: 4937-5020. In some embodiments, the sense strand sequence comprises or consists of the sequence of any one of SEQ ID NOs: 4937-5020, or a sense strand sequence thereof having 1, 2, 3, or 4 nucleoside substitutions, additions, or deletions. In some embodiments, the sense strand sequence comprises or consists of the sequence of any one of SEQ ID NOs: 4937-5020, or a sense strand sequence thereof having 1 or 2 nucleoside substitutions, additions, or deletions. In some embodiments, the sense strand sequence comprises or consists of a sequence 100% identical to SEQ ID NOs: 4937-5020. The sense strand sequence may include the first 5, 6, 7, 8, 9, 10, 11, 12, 13, 14, 15, 16, 17, 18, or 19 nucleotides (in the 5′ to 3′ direction) of any of the aforementioned sequences. The sense strand sequence may include the first 19 nucleotides of any of the aforementioned sequences. The sense strand sequence may include the last 5, 6, 7, 8, 9, 10, 11, 12, 13, 14, 15, 16, 17, 18, or 19 nucleotides (in the 5′ to 3′ direction) of any of the aforementioned sequences. The sense strand may comprise an overhang. The sense strand may comprise a modification pattern described herein, such as a different set of modifications or modification pattern than the aforementioned sequences. The sense strand may comprise a lipid moiety. The sense strand may comprise a GalNAc moiety.

[0186] In some embodiments, the siRNA comprises a sense strand having a sequence in accordance with any of SEQ ID NOs: 5021-5036. In some embodiments, the sense strand sequence comprises or consists of sequence at least 75% identical to any one of SEQ ID NOs: 5021-5036, at least 80% identical to any one of SEQ ID NOs: 5021-5036, at least 85% identical to of any one of SEQ ID NOs: 5021-5036, at least 90% identical to any one of SEQ ID NOs: 5021-5036, or at least 95% identical to any one of SEQ ID NOs: 5021-5036. In some embodiments, the sense strand sequence comprises or consists of the sequence of any one of SEQ ID NOs: 5021-5036, or a sense strand sequence thereof having 1, 2, 3, or 4 nucleoside substitutions, additions, or deletions. In some embodiments, the sense strand sequence comprises or consists of the sequence of any one of SEQ ID NOs: 5021-5036, or a sense strand sequence thereof having 1 or 2 nucleoside substitutions, additions, or deletions. In some embodiments, the sense strand sequence comprises or consists of a sequence 100% identical to SEQ ID NOs: 5021-5036. The sense strand sequence may include the first 5, 6, 7, 8, 9, 10, 11, 12, 13, 14, 15, 16, 17, 18, or 19 nucleotides (in the 5′ to 3′ direction) of any of the aforementioned sequences. The sense strand sequence may include the first 19 nucleotides of any of the aforementioned sequences. The sense strand sequence may include the last 5, 6, 7, 8, 9, 10, 11, 12, 13, 14, 15, 16, 17, 18, or 19 nucleotides (in the 5′ to 3′ direction) of any of the aforementioned sequences. The sense strand may comprise an overhang. The sense strand may comprise a modification pattern described herein, such as a different set of modifications or modification pattern than the aforementioned sequences. The sense strand may comprise a lipid moiety. The sense strand may comprise a GalNAc moiety.

[0187] In some embodiments, the siRNA comprises an antisense strand having a sequence in accordance with any of SEQ ID NOs: 5037-5052. In some embodiments, the antisense strand sequence comprises or consists of sequence at least 75% identical to any one of SEQ ID NOs: 5037-5052, at least 80% identical to any one of SEQ ID NOs: 5037-5052, at least 85% identical to of any one of SEQ ID NOs: 5037-5052, at least 90% identical to any one of SEQ ID NOs: 5037-5052, or at least 95% identical to any one of SEQ ID NOs: 5037-5052. In some embodiments, the antisense strand sequence comprises or consists of the sequence of any one of SEQ ID NOs: 5037-5052, or an antisense strand sequence thereof having 1, 2, 3, or 4 nucleoside substitutions, additions, or deletions. In some embodiments, the antisense strand sequence comprises or consists of the sequence of any one of SEQ ID NOs: 5037-5052, or an antisense strand sequence thereof having 1 or 2 nucleoside substitutions, additions, or deletions. In some embodiments, the antisense strand sequence comprises or consists of a sequence 100% identical to SEQ ID NOs: 5037-5052. The antisense strand sequence may include the first 5, 6, 7, 8, 9, 10, 11, 12, 13, 14, 15, 16, 17, 18, or 19 nucleotides (in the 5′ to 3′ direction) of any of the aforementioned sequences. The antisense strand sequence may include the first 19 nucleotides of any of the aforementioned sequences. The antisense strand sequence may include the last 5, 6, 7, 8, 9, 10, 11, 12, 13, 14, 15, 16, 17, 18, or 19 nucleotides (in the 5′ to 3′ direction) of any of the aforementioned sequences. The antisense strand may comprise an overhang. The antisense strand may comprise a modification pattern described herein, such as a different set of modifications or modification pattern than the aforementioned sequences. The antisense strand may comprise a lipid moiety or a GalNAc moiety.

[0188] In some embodiments, the siRNA comprises a sense strand having a sequence in accordance with any of SEQ ID NOs: 5021, 5022, 5026, and 5031. In some embodiments, the sense strand sequence comprises or consists of sequence at least 75% identical to any one of SEQ ID NOs: 5021, 5022, 5026, and 5031, at least 80% identical to any one of SEQ ID NOs: 5021, 5022, 5026, and 5031, at least 85% identical to of any one of SEQ ID NOs: 5021, 5022, 5026, and 5031, at least 90% identical to any one of SEQ ID NOs: 5021, 5022, 5026, and 5031, or at least 95% identical to any one of SEQ ID NOs: 5021, 5022, 5026, and 5031. In some embodiments, the sense strand sequence comprises or consists of the sequence of any one of SEQ ID NOs: 5021, 5022, 5026, and 5031, or a sense strand sequence thereof having 1, 2, 3, or 4 nucleoside substitutions, additions, or deletions. In some embodiments, the sense strand sequence comprises or consists of the sequence of any one of SEQ ID NOs: 5021, 5022, 5026, and 5031, or a sense strand sequence thereof having 1 or 2 nucleoside substitutions, additions, or deletions. In some embodiments, the sense strand sequence comprises or consists of a sequence 100% identical to SEQ ID NOs: 5021, 5022, 5026, and 5031. The sense strand sequence may include the first 5, 6, 7, 8, 9, 10, 11, 12, 13, 14, 15, 16, 17, 18, or 19 nucleotides (in the 5′ to 3′ direction) of any of the aforementioned sequences. The sense strand sequence may include the first 19 nucleotides of any of the aforementioned sequences. The sense strand sequence may include the last 5, 6, 7, 8, 9, 10, 11, 12, 13, 14, 15, 16, 17, 18, or 19 nucleotides (in the 5′ to 3′ direction) of any of the aforementioned sequences. The sense strand may comprise an overhang. The sense strand may comprise a modification pattern described herein, such as a different set of modifications or modification pattern than the aforementioned sequences. The sense strand may comprise a lipid moiety. The sense strand may comprise a GalNAc moiety.

[0189] In some embodiments, the siRNA comprises an antisense strand having a sequence in accordance with any of SEQ ID NOs: 5037, 5038, 5042, and 5047. In some embodiments, the antisense strand sequence comprises or consists of sequence at least 75% identical to any one of SEQ ID NOs: 5037, 5038, 5042, and 5047, at least 80% identical to any one of SEQ ID NOs: 5037, 5038, 5042, and 5047, at least 85% identical to of any one of SEQ ID NOs: 5037, 5038, 5042, and 5047, at least 90% identical to any one of SEQ ID NOs: 5037, 5038, 5042, and 5047, or at least 95% identical to any one of SEQ ID NOs: 5037, 5038, 5042, and 5047. In some embodiments, the antisense strand sequence comprises or consists of the sequence of any one of SEQ ID NOs: 5037, 5038, 5042, and 5047, or an antisense strand sequence thereof having 1, 2, 3, or 4 nucleoside substitutions, additions, or deletions. In some embodiments, the antisense strand sequence comprises or consists of the sequence of any one of SEQ ID NOs: 5037, 5038, 5042, and 5047, or an antisense strand sequence thereof having 1 or 2 nucleoside substitutions, additions, or deletions. In some embodiments, the antisense strand sequence comprises or consists of a sequence 100% identical to SEQ ID NOs: 5037, 5038, 5042, and 5047. The antisense strand sequence may include the first 5, 6, 7, 8, 9, 10, 11, 12, 13, 14, 15, 16, 17, 18, or 19 nucleotides (in the 5′ to 3′ direction) of any of the aforementioned sequences. The antisense strand sequence may include the first 19 nucleotides of any of the aforementioned sequences. The antisense strand sequence may include the last 5, 6, 7, 8, 9, 10, 11, 12, 13, 14, 15, 16, 17, 18, or 19 nucleotides (in the 5′ to 3′ direction) of any of the aforementioned sequences. The antisense strand may comprise an overhang. The antisense strand may comprise a modification pattern described herein, such as a different set of modifications or modification pattern than the aforementioned sequences. The antisense strand may comprise a lipid moiety or a GalNAc moiety.

[0190] In some embodiments, the siRNA comprises a sense strand having a sequence in accordance with SEQ ID NO: 5021. In some embodiments, the sense strand sequence comprises or consists of sequence at least 75% identical to SEQ ID NO: 5021, at least 80% identical to SEQ ID NO: 5021, at least 85% identical to SEQ ID NO: 5021, at least 90% identical to SEQ ID NO: 5021, or at least 95% identical to SEQ ID NO: 5021. In some embodiments, the sense strand sequence comprises or consists of the sequence of SEQ ID NO: 5021, or a sense strand sequence thereof having 1, 2, 3, or 4 nucleoside substitutions, additions, or deletions. In some embodiments, the sense strand sequence comprises or consists of the sequence of SEQ ID NO: 5021, or a sense strand sequence thereof having 1 or 2 nucleoside substitutions, additions, or deletions. In some embodiments, the sense strand sequence comprises or consists of a sequence 100% identical to SEQ ID NO: 5021. The sense strand sequence may include the first 5, 6, 7, 8, 9, 10, 11, 12, 13, 14, 15, 16, 17, 18, or 19 nucleotides (in the 5′ to 3′ direction) of any of the aforementioned sequences. The sense strand sequence may include the first 19 nucleotides of any of the aforementioned sequences. The sense strand sequence may include the last 5, 6, 7, 8, 9, 10, 11, 12, 13, 14, 15, 16, 17, 18, or 19 nucleotides (in the 5′ to 3′ direction) of any of the aforementioned sequences. The sense strand may comprise an overhang. The sense strand may comprise a modification pattern described herein, such as a different set of modifications or modification pattern than the aforementioned sequences. The sense strand may comprise a lipid moiety. The sense strand may comprise a GalNAc moiety.

[0191] In some embodiments, the siRNA comprises a sense strand having a sequence in accordance with SEQ ID NO: 5022. In some embodiments, the sense strand sequence comprises or consists of sequence at least 75% identical to SEQ ID NO: 5022, at least 80% identical to SEQ ID NO: 5022, at least 85% identical to SEQ ID NO: 5022, at least 90% identical to SEQ ID NO: 5022, or at least 95% identical to SEQ ID NO: 5022. In some embodiments, the sense strand sequence comprises or consists of the sequence of SEQ ID NO: 5022, or a sense strand sequence thereof having 1, 2, 3, or 4 nucleoside substitutions, additions, or deletions. In some embodiments, the sense strand sequence comprises or consists of the sequence of SEQ ID NO: 5022, or a sense strand sequence thereof having 1 or 2 nucleoside substitutions, additions, or deletions. In some embodiments, the sense strand sequence comprises or consists of a sequence 100% identical to SEQ ID NO: 5022. The sense strand sequence may include the first 5, 6, 7, 8, 9, 10, 11, 12, 13, 14, 15, 16, 17, 18, or 19 nucleotides (in the 5′ to 3′ direction) of any of the aforementioned sequences. The sense strand sequence may include the first 19 nucleotides of any of the aforementioned sequences. The sense strand sequence may include the last 5, 6, 7, 8, 9, 10, 11, 12, 13, 14, 15, 16, 17, 18, or 19 nucleotides (in the 5′ to 3′ direction) of any of the aforementioned sequences. The sense strand may comprise an overhang. The sense strand may comprise a modification pattern described herein, such as a different set of modifications or modification pattern than the aforementioned sequences. The sense strand may comprise a lipid moiety. The sense strand may comprise a GalNAc moiety.

[0192] In some embodiments, the siRNA comprises a sense strand having a sequence in accordance with SEQ ID NO: 5026. In some embodiments, the sense strand sequence comprises or consists of sequence at least 75% identical to SEQ ID NO: 5026, at least 80% identical to SEQ ID NO: 5026, at least 85% identical to SEQ ID NO: 5026, at least 90% identical to SEQ ID NO: 5026, or at least 95% identical to SEQ ID NO: 5026. In some embodiments, the sense strand sequence comprises or consists of the sequence of SEQ ID NO: 5026, or a sense strand sequence thereof having 1, 2, 3, or 4 nucleoside substitutions, additions, or deletions. In some embodiments, the sense strand sequence comprises or consists of the sequence of SEQ ID NO: 5026, or a sense strand sequence thereof having 1 or 2 nucleoside substitutions, additions, or deletions. In some embodiments, the sense strand sequence comprises or consists of a sequence 100% identical to SEQ ID NO: 5026. The sense strand sequence may include the first 5, 6, 7, 8, 9, 10, 11, 12, 13, 14, 15, 16, 17, 18, or 19 nucleotides (in the 5′ to 3′ direction) of any of the aforementioned sequences. The sense strand sequence may include the first 19 nucleotides of any of the aforementioned sequences. The sense strand sequence may include the last 5, 6, 7, 8, 9, 10, 11, 12, 13, 14, 15, 16, 17, 18, or 19 nucleotides (in the 5′ to 3′ direction) of any of the aforementioned sequences. The sense strand may comprise an overhang. The sense strand may comprise a modification pattern described herein, such as a different set of modifications or modification pattern than the aforementioned sequences. The sense strand may comprise a lipid moiety. The sense strand may comprise a GalNAc moiety.

[0193] In some embodiments, the siRNA comprises a sense strand having a sequence in accordance with SEQ ID NO: 5031. In some embodiments, the sense strand sequence comprises or consists of sequence at least 75% identical to SEQ ID NO: 5031, at least 80% identical to SEQ ID NO: 5031, at least 85% identical to SEQ ID NO: 5031, at least 90% identical to SEQ ID NO: 5031, or at least 95% identical to SEQ ID NO: 5031. In some embodiments, the sense strand sequence comprises or consists of the sequence of SEQ ID NO: 5031, or a sense strand sequence thereof having 1, 2, 3, or 4 nucleoside substitutions, additions, or deletions. In some embodiments, the sense strand sequence comprises or consists of the sequence of SEQ ID NO: 5031, or a sense strand sequence thereof having 1 or 2 nucleoside substitutions, additions, or deletions. In some embodiments, the sense strand sequence comprises or consists of a sequence 100% identical to SEQ ID NO: 5031. The sense strand sequence may include the first 5, 6, 7, 8, 9, 10, 11, 12, 13, 14, 15, 16, 17, 18, or 19 nucleotides (in the 5′ to 3′ direction) of any of the aforementioned sequences. The sense strand sequence may include the first 19 nucleotides of any of the aforementioned sequences. The sense strand sequence may include the last 5, 6, 7, 8, 9, 10, 11, 12, 13, 14, 15, 16, 17, 18, or 19 nucleotides (in the 5′ to 3′ direction) of any of the aforementioned sequences. The sense strand may comprise an overhang. The sense strand may comprise a modification pattern described herein, such as a different set of modifications or modification pattern than the aforementioned sequences. The sense strand may comprise a lipid moiety. The sense strand may comprise a GalNAc moiety.

[0194] In some embodiments, the siRNA comprises an antisense strand having a sequence in accordance with SEQ ID NO: 5037. In some embodiments, the antisense strand sequence comprises or consists of sequence at least 75% identical to SEQ ID NO: 5037, at least 80% identical to SEQ ID NO: 5037, at least 85% identical to SEQ ID NO: 5037, at least 90% identical to SEQ ID NO: 5037, or at least 95% identical to SEQ ID NO: 5037. In some embodiments, the antisense strand sequence comprises or consists of the sequence of SEQ ID NO: 5037, or an antisense strand sequence thereof having 1, 2, 3, or 4 nucleoside substitutions, additions, or deletions. In some embodiments, the antisense strand sequence comprises or consists of the sequence of SEQ ID NO: 5037, or an antisense strand sequence thereof having 1 or 2 nucleoside substitutions, additions, or deletions. In some embodiments, the antisense strand sequence comprises or consists of a sequence 100% identical to SEQ ID NO: 5037. The antisense strand sequence may include the first 5, 6, 7, 8, 9, 10, 11, 12, 13, 14, 15, 16, 17, 18, or 19 nucleotides (in the 5′ to 3′ direction) of any of the aforementioned sequences. The antisense strand sequence may include the first 19 nucleotides of any of the aforementioned sequences. The antisense strand sequence may include the last 5, 6, 7, 8, 9, 10, 11, 12, 13, 14, 15, 16, 17, 18, or 19 nucleotides (in the 5′ to 3′ direction) of any of the aforementioned sequences. The antisense strand may comprise an overhang. The antisense strand may comprise a modification pattern described herein, such as a different set of modifications or modification pattern than the aforementioned sequences. The antisense strand may comprise a lipid moiety or a GalNAc moiety.

[0195] In some embodiments, the siRNA comprises an antisense strand having a sequence in accordance with SEQ ID NO: 5038. In some embodiments, the antisense strand sequence comprises or consists of sequence at least 75% identical to SEQ ID NO: 5038, at least 80% identical to SEQ ID NO: 5038, at least 85% identical to SEQ ID NO: 5038, at least 90% identical to SEQ ID NO: 5038, or at least 95% identical to SEQ ID NO: 5038. In some embodiments, the antisense strand sequence comprises or consists of the sequence of SEQ ID NO: 5038, or an antisense strand sequence thereof having 1, 2, 3, or 4 nucleoside substitutions, additions, or deletions. In some embodiments, the antisense strand sequence comprises or consists of the sequence of SEQ ID NO: 5038, or an antisense strand sequence thereof having 1 or 2 nucleoside substitutions, additions, or deletions. In some embodiments, the antisense strand sequence comprises or consists of a sequence 100% identical to SEQ ID NO: 5038. The antisense strand sequence may include the first 5, 6, 7, 8, 9, 10, 11, 12, 13, 14, 15, 16, 17, 18, or 19 nucleotides (in the 5′ to 3′ direction) of any of the aforementioned sequences. The antisense strand sequence may include the first 19 nucleotides of any of the aforementioned sequences. The antisense strand sequence may include the last 5, 6, 7, 8, 9, 10, 11, 12, 13, 14, 15, 16, 17, 18, or 19 nucleotides (in the 5′ to 3′ direction) of any of the aforementioned sequences. The antisense strand may comprise an overhang. The antisense strand may comprise a modification pattern described herein, such as a different set of modifications or modification pattern than the aforementioned sequences. The antisense strand may comprise a lipid moiety or a GalNAc moiety.

[0196] In some embodiments, the siRNA comprises an antisense strand having a sequence in accordance with SEQ ID NO: 5042. In some embodiments, the antisense strand sequence comprises or consists of sequence at least 75% identical to SEQ ID NO: 5042, at least 80% identical to SEQ ID NO: 5042, at least 85% identical to SEQ ID NO: 5042, at least 90% identical to SEQ ID NO: 5042, or at least 95% identical to SEQ ID NO: 5042. In some embodiments, the antisense strand sequence comprises or consists of the sequence of SEQ ID NO: 5042, or an antisense strand sequence thereof having 1, 2, 3, or 4 nucleoside substitutions, additions, or deletions. In some embodiments, the antisense strand sequence comprises or consists of the sequence of SEQ ID NO: 5042, or an antisense strand sequence thereof having 1 or 2 nucleoside substitutions, additions, or deletions. In some embodiments, the antisense strand sequence comprises or consists of a sequence 100% identical to SEQ ID NO: 5042. The antisense strand sequence may include the first 5, 6, 7, 8, 9, 10, 11, 12, 13, 14, 15, 16, 17, 18, or 19 nucleotides (in the 5′ to 3′ direction) of any of the aforementioned sequences. The antisense strand sequence may include the first 19 nucleotides of any of the aforementioned sequences. The antisense strand sequence may include the last 5, 6, 7, 8, 9, 10, 11, 12, 13, 14, 15, 16, 17, 18, or 19 nucleotides (in the 5′ to 3′ direction) of any of the aforementioned sequences. The antisense strand may comprise an overhang. The antisense strand may comprise a modification pattern described herein, such as a different set of modifications or modification pattern than the aforementioned sequences. The antisense strand may comprise a lipid moiety or a GalNAc moiety.

[0197] In some embodiments, the siRNA comprises an antisense strand having a sequence in accordance with SEQ ID NO: 5047. In some embodiments, the antisense strand sequence comprises or consists of sequence at least 75% identical to SEQ ID NO: 5047, at least 80% identical to SEQ ID NO: 5047, at least 85% identical to SEQ ID NO: 5047, at least 90% identical to SEQ ID NO: 5047, or at least 95% identical to SEQ ID NO: 5047. In some embodiments, the antisense strand sequence comprises or consists of the sequence of SEQ ID NO: 5047, or an antisense strand sequence thereof having 1, 2, 3, or 4 nucleoside substitutions, additions, or deletions. In some embodiments, the antisense strand sequence comprises or consists of the sequence of SEQ ID NO: 5047, or an antisense strand sequence thereof having 1 or 2 nucleoside substitutions, additions, or deletions. In some embodiments, the antisense strand sequence comprises or consists of a sequence 100% identical to SEQ ID NO: 5047. The antisense strand sequence may include the first 5, 6, 7, 8, 9, 10, 11, 12, 13, 14, 15, 16, 17, 18, or 19 nucleotides (in the 5′ to 3′ direction) of any of the aforementioned sequences. The antisense strand sequence may include the first 19 nucleotides of any of the aforementioned sequences. The antisense strand sequence may include the last 5, 6, 7, 8, 9, 10, 11, 12, 13, 14, 15, 16, 17, 18, or 19 nucleotides (in the 5′ to 3′ direction) of any of the aforementioned sequences. The antisense strand may comprise an overhang. The antisense strand may comprise a modification pattern described herein, such as a different set of modifications or modification pattern than the aforementioned sequences. The antisense strand may comprise a lipid moiety or a GalNAc moiety.

### 4. Modified ASO's

[0198] In some embodiments, the composition comprises an oligonucleotide that inhibits the expression of MS4A4E, wherein the oligonucleotide comprises an antisense oligonucleotide (ASO). In some embodiments, the ASO comprises modification pattern ASO1:
[0199] 5′-nsnsnsnsnsdNsdNsdNsdNsdNsdNsdNsdNsdNsdNsnsnsnsnsn-3′ (SEQ ID NO: 5068), wherein “dN” is any deoxynucleotide, “n” is a 2′O-methyl or 2′O-methoxyethyl-modified nucleoside, and “s” is a phosphorothioate or phosphate linkage. In some embodiments, the ASO comprises modification pattern 1S, 2S, 3S, 4S, 5S, 6S, 7S, 8S, 9S, 10S, 11S, 12S, 13S, 14S, 15S, 16S, 17S, 18S, 19S, 20S, 21S, 22S, 23S, 24S, 25S, 26S, 27S, 28S, 29S, 30S, 31S, 32S, 33S, 34S, 35S, 36S, 37S, 38S, 39S, 40S, 41S, 42S, 1AS, 2AS, 3AS, 4AS, 5AS, 6AS, 7AS, or 8AS.

### E. Formulations

[0200] In some embodiments, the composition is a pharmaceutical composition. In some embodiments, the composition is sterile. In some embodiments, the composition further comprises a pharmaceutically acceptable carrier.

[0201] In some embodiments, the pharmaceutically acceptable carrier comprises water. In some embodiments, the pharmaceutically acceptable carrier comprises a buffer. In some embodiments, the pharmaceutically acceptable carrier comprises a saline solution. In some embodiments, the pharmaceutically acceptable carrier comprises water, a buffer, or a saline solution. In some embodiments, the composition comprises a liposome. In some embodiments, the pharmaceutically acceptable carrier comprises liposomes, lipids, nanoparticles, proteins, protein-antibody complexes, peptides, cellulose, nanogel, or a combination thereof.

### II. METHODS AND USES

[0202] Disclosed herein, in some embodiments, are methods of administering a composition described herein to a subject. Some embodiments relate to use a composition described herein, such as administering the composition to a subject.

[0203] Some embodiments relate to a method of treating a disorder in a subject in need thereof. Some embodiments relate to use of a composition described herein in the method of treatment. Some embodiments include administering a composition described herein to a subject with the disorder. In some embodiments, the administration treats the disorder in the subject. In some embodiments, the composition treats the disorder in the subject.

[0204] In some embodiments, the treatment comprises prevention, inhibition, or reversion of the disorder in the subject. Some embodiments relate to use of a composition described herein in the method of preventing, inhibiting, or reversing the disorder. Some embodiments relate to a method of preventing, inhibiting, or reversing a disorder a disorder in a subject in need thereof. Some embodiments include administering a composition described herein to a subject with the disorder. In some embodiments, the administration prevents, inhibits, or reverses the disorder in the subject. In some embodiments, the composition prevents, inhibits, or reverses the disorder in the subject.

[0205] Some embodiments relate to a method of preventing a disorder a disorder in a subject in need thereof. Some embodiments relate to use of a composition described herein in the method of preventing the disorder. Some embodiments include administering a composition described herein to a subject with the disorder. In some embodiments, the administration prevents the disorder in the subject. In some embodiments, the composition prevents the disorder in the subject.

[0206] Some embodiments relate to a method of inhibiting a disorder a disorder in a subject in need thereof. Some embodiments relate to use of a composition described herein in the method of inhibiting the disorder. Some embodiments include administering a composition described herein to a subject with the disorder. In some embodiments, the administration inhibits the disorder in the subject. In some embodiments, the composition inhibits the disorder in the subject.

[0207] Some embodiments relate to a method of reversing a disorder a disorder in a subject in need thereof. Some embodiments relate to use of a composition described herein in the method of reversing the disorder. Some embodiments include administering a composition described herein to a subject with the disorder. In some embodiments, the administration reverses the disorder in the subject. In some embodiments, the composition reverses the disorder in the subject.

### A. Disorders

[0208] Some embodiments of the methods described herein include treating a disorder in a subject in need thereof. In some embodiments, the disorder is a liver disorder. Non-limiting examples of liver disorders may include non-alcoholic fatty liver disease (NAFLD), non-alcoholic steatohepatitis (NASH), liver fibrosis, or cirrhosis. In some embodiments, the liver disorder comprises a fatty liver disorder such as NAFLD or NASH. In some embodiments, the disorder is an metabolic disorder such as an adipose disorder. Some examples of such disorders may include diabetes (e.g. type II diabetes), metabolic syndrome, hyperlipidemia, hypertriglyceridemia, or obesity. In some embodiments, the disorder is a heart disorder. Non-limiting examples of heart disorders may include ischemic heart disease or coronary heart disease.

### B. Subjects

[0209] Some embodiments of the methods described herein include treatment of a subject. Non-limiting examples of subjects include vertebrates, animals, mammals, dogs, cats, cattle, rodents, mice, rats, primates, monkeys, and humans. In some embodiments, the subject is a vertebrate. In some embodiments, the subject is an animal. In some embodiments, the subject is a mammal. In some embodiments, the subject is a dog. In some embodiments, the subject is a cat. In some embodiments, the subject is a cattle. In some embodiments, the subject is a mouse. In some embodiments, the subject is a rat. In some embodiments, the subject is a primate. In some embodiments, the subject is a monkey. In some embodiments, the subject is an animal, a mammal, a dog, a cat, cattle, a rodent, a mouse, a rat, a primate, or a monkey. In some embodiments, the subject is a human.

[0210] In some embodiments, the subject is male. In some embodiments, the subject is female.

[0211] In some embodiments, the subject has a body mass index (BMI) of 25, 26, 27, 28, 29, 30, 31, 32, 33, 34, 35, 36, 37, 38, 39, 40, 41, 42, 43, 44, 45, 46, 47, 48, 49, 50, or more, or a range defined by any two of the aforementioned integers. In some embodiments, the subject is overweight. In some embodiments, the subject has a BMI of 25 or more. In some embodiments, the subject has a BMI of 25-29. In some embodiments, the subject is obese. In some embodiments, the subject has a BMI of 30 or more. In some embodiments, the subject has a BMI of 30-39. In some embodiments, the subject has a BMI of 40-50. In some embodiments, the subject has a BMI of 25-50.

[0212] In some embodiments, the subject is ≥90 years of age. In some embodiments, the subject is ≥85 years of age. In some embodiments, the subject is ≥80 years of age. In some embodiments, the subject is ≥70 years of age. In some embodiments, the subject is ≥60 years of age. In some embodiments, the subject is ≥50 years of age. In some embodiments, the subject is ≥40 years of age. In some embodiments, the subject is ≥30 years of age. In some embodiments, the subject is ≥20 years of age. In some embodiments, the subject is ≥10 years of age. In some embodiments, the subject is ≥1 years of age. In some embodiments, the subject is ≥0 years of age.

[0213] In some embodiments, the subject is ≤100 years of age. In some embodiments, the subject is ≤90 years of age. In some embodiments, the subject is ≤85 years of age. In some embodiments, the subject is ≤80 years of age. In some embodiments, the subject is ≤70 years of age. In some embodiments, the subject is ≤60 years of age. In some embodiments, the subject is ≤50 years of age. In some embodiments, the subject is ≤40 years of age. In some embodiments, the subject is ≤30 years of age. In some embodiments, the subject is ≤20 years of age. In some embodiments, the subject is ≤10 years of age. In some embodiments, the subject is ≤1 years of age.

[0214] In some embodiments, the subject is between 0 and 100 years of age. In some embodiments, the subject is between 20 and 90 years of age. In some embodiments, the subject is between 30 and 80 years of age. In some embodiments, the subject is between 40 and 75 years of age. In some embodiments, the subject is between 50 and 70 years of age. In some embodiments, the subject is between 40 and 85 years of age.

### C. Baseline Measurements

[0215] Some embodiments of the methods described herein include obtaining a baseline measurement from a subject. For example, in some embodiments, a baseline measurement is obtained from the subject prior to treating the subject. Non-limiting examples of baseline measurements include a baseline liver fat percentage measurement, a baseline liver fibrosis score, a baseline NAFLD activity score, a baseline blood alanine aminotransferase (ALT) measurement, a baseline blood aspartate aminotransferase (AST) measurement, a baseline blood gamma-glutamyl transferase (GGT) measurement, a baseline blood triglyceride measurement, a baseline HDL cholesterol measurement, a baseline non-HDL measurement, a baseline blood hemoglobin A1C measurement, a baseline body weight, a baseline BMI, a baseline waist circumference measurement, a baseline hip circumference measurement, a baseline waist-hip ratio, a baseline insulin measurement, a baseline glucose measurement, a baseline body fat percentage measurement, a baseline MS4A4E protein measurement, or a baseline MS4A4E mRNA measurement.

[0216] In some embodiments, the baseline measurement is obtained directly from the subject. In some embodiments, the baseline measurement is obtained by observation, for example by observation of the subject or of the subject's tissue. In some embodiments, the baseline measurement is obtained noninvasively using an imaging device.

[0217] In some embodiments, the baseline measurement is obtained in a sample from the subject. In some embodiments, the baseline measurement is obtained in one or more histological tissue sections. In some embodiments, the baseline measurement is obtained by performing an assay such as an immunoassay, a colorimetric assay, or a fluorescence assay, on the sample obtained from the subject. In some embodiments, the baseline measurement is obtained by an immunoassay, a colorimetric assay, a fluorescence assay, or a chromatography (e.g. HPLC) assay. In some embodiments, the baseline measurement is obtained by PCR.

[0218] In some embodiments, the baseline measurement is a baseline liver steatosis measurement. In some embodiments, the baseline liver steatosis measurement is a baseline liver fat percentage (LFP) measurement. In some embodiments, the baseline measurement is a baseline LFP measurement. In some embodiments, the baseline LFP measurement is indicated as a mass/mass percentage of fat/total tissue. In some embodiments, the baseline LFP measurement is indicated as a mass/volume percentage of fat/total tissue. In some embodiments, the baseline LFP measurement is indicated as a volume/mass percentage of fat/total tissue. In some embodiments, the baseline LFP measurement is indicated as a volume/volume percentage of fat/total tissue. In some embodiments, the baseline LFP measurement is indicated as a score. In some embodiments, the baseline LFP measurement is obtained noninvasively. In some embodiments, the baseline LFP measurement is obtained by a medical imaging device. In some embodiments, the baseline LFP measurement is obtained by a device such as a medical resonance imaging (MRI) device, a magnetic resonance spectroscopy device, a computed tomography device, a controlled attenuation parameter (CAP), a transient elastography device, or an ultrasound device. In some embodiments, the baseline LFP measurement is obtained in a liver sample. In some embodiments, the baseline LFP measurement comprises a baseline liver triglyceride measurement. In some embodiments, the baseline LFP measurement is obtained by an assay such as an immunoassay, a colorimetric assay, or a fluorescence assay. In some embodiments, the baseline LFP measurement or the baseline LFP measurement is obtained using a scoring system upon a visual inspection of a sample such as a histological sample. In some embodiments, the baseline LFP measurement or the baseline LFP measurement is obtained using a stain with an affinity to fats, such as a lysochrome diazo dye.

[0219] In some embodiments, the baseline measurement is a baseline liver fibrosis measurement. In some embodiments, the baseline liver fibrosis measurement is a baseline liver fibrosis score (LFS). In some embodiments, the baseline LFS comprises a score of 0, 1, 2, 3, or 4, or a range of scores defined by any two of the aforementioned numbers. In some embodiments, the baseline LFS comprises a score of 0-4. In some embodiments, the baseline LFS is obtained using a scoring system exemplified in Table 3. In some embodiments, the baseline LFS measurement is obtained noninvasively. In some embodiments, the baseline LFS measurement is obtained by a medical imaging device such as a vibration-controlled transient elastography (VCTE) device, a shear wave elastography device, a medical resonance imaging (MRI) device, a magnetic resonance spectroscopy device, a computed tomography device, or an ultrasound device. In some embodiments, the baseline LFS measurement is obtained in a liver sample. In some embodiments, the baseline LFS is obtained by an assay such as an immunoassay, a colorimetric assay, or a fluorescence assay. In some embodiments, the baseline LFS is obtained using one or more indirect markers or measures of liver fibrosis such as an aspartate aminotransferase-to-platelet ratio index (APRI), a Fibrosis-4 (FIB-4) index, a FibroIndex, a Forns Index, a Hepascore, or a FibroTest. In some embodiments, the baseline LFS is obtained using one or more indirect markers or measures of liver fibrosis such as a FIBROSpect test or a FIBROSpect II test. In some embodiments, the baseline LFS is obtained by RT-qPCR or RNA sequencing of one or more fibrosis-related genes such as a collagen gene. In some embodiments, the baseline LFS or the baseline LFS is obtained using a scoring system upon a visual inspection of a sample such as a histological sample. In some embodiments, the baseline LFS or the baseline LFS is obtained using a stain with an affinity to collagen.

TABLE 3
Examples of Liver Fibrosis Scoring Systems

| Score | IASL | Batts-Ludwig | Metavir |
|---|---|---|---|
| 0 | No fibrosis | No fibrosis | No fibrosis |
| 1 | Mild fibrosis | Fibrous portal expansion | Periportal fibrotic |
| | | | expansion |
| 2 | Moderate fibrosis | Rare bridges or septae | Periportal septae |
| | | | (>1 septum) |
| 3 | Severe fibrosis | Numerous bridges or | Portal-central septae |
| | | septae | |
| 4 | Cirrhosis | Cirrhosis | Cirrhosis |

[0220] In some embodiments, the baseline measurement is a baseline non-alcoholic fatty liver disease (NAFLD) activity score. In some embodiments, the baseline NAFLD activity score comprises a numerical value such as a number of points. In some embodiments, the numerical value is 0, 1, 2, 3, 4, 5, 6, 7, or 8, or a range defined by any two of the aforementioned numerical values. In some embodiments, the numerical value is 0-8. In some embodiments, the baseline NAFLD activity score comprises a steatosis grade such as a baseline liver fat percentage. In some embodiments, a steatosis grade<5% comprises 0 points in the baseline NAFLD activity score. In some embodiments, a steatosis grade of 5-33% comprises 1 point in the baseline NAFLD activity score. In some embodiments, a steatosis grade of 34-66% comprises 2 points in the baseline NAFLD activity score. In some embodiments, a steatosis grade of >66% comprises 3 points in the baseline NAFLD activity score. In some embodiments, the baseline NAFLD activity score comprises a lobular inflammation grade. In some embodiments, the lobular inflammation grade comprises an assessment of inflammatory foci. In some embodiments, a lobular inflammation grade comprising 0 foci comprises 0 points in the baseline NAFLD activity score. In some embodiments, a lobular inflammation grade comprising 1 focus per a field (such as a 20× field or a 200× field) comprises 1 point in the baseline NAFLD activity score. In some embodiments, a lobular inflammation grade comprising 2-4 foci per field comprises 2 points in the baseline NAFLD activity score. In some embodiments, a lobular inflammation grade comprising >4 foci per field comprises 3 points in the baseline NAFLD activity score. In some embodiments, the baseline NAFLD activity score comprises a liver cell injury grade such as an amount of ballooning cells. In some embodiments, a liver cell injury comprising no ballooning cells comprises 0 points in the baseline NAFLD activity score. In some embodiments, a liver cell injury comprising some new balloon cells comprises 1 points in the baseline NAFLD activity score. In some embodiments, a liver cell injury comprising many ballooning cells or prominent ballooning comprises 2 points in the baseline NAFLD activity score. In some embodiments, the baseline NAFLD activity score is obtained invasively, based on histology, and/or in a liver biopsy.

[0221] In some embodiments, the baseline measurement is a baseline liver enzyme measurement. In some embodiments, the baseline liver enzyme measurement is a baseline alanine aminotransferase (ALT) measurement. In some embodiments, the baseline liver enzyme measurement is a baseline aspartate aminotransferase (AST) measurement. In some embodiments, the baseline liver enzyme measurement comprises an ALT/AST ratio, or comprises an AST/ALT ratio.

[0222] In some embodiments, the baseline measurement is a baseline alanine aminotransferase (ALT) measurement. In some embodiments, the baseline ALT measurement is a baseline ALT concentration (for example, Units/dL). In some embodiments, the baseline ALT measurement is a baseline circulating ALT measurement, for example, a baseline blood, serum, or plasma ALT level. In some embodiments, the baseline ALT measurement is obtained by an assay such as an immunoassay, a colorimetric assay, or a fluorescence assay.

[0223] In some embodiments, the baseline measurement is a baseline aspartate aminotransferase (AST) measurement. In some embodiments, the baseline AST measurement is a baseline AST concentration (for example, Units/L). In some embodiments, the baseline AST measurement is a baseline circulating AST measurement, for example, a baseline blood, serum, or plasma AST level. In some embodiments, the baseline AST measurement is obtained by an assay such as an immunoassay, a colorimetric assay, or a fluorescence assay.

[0224] In some embodiments, the baseline measurement is a baseline glucose measurement. In some embodiments, the baseline glucose measurement is a baseline glucose concentration (for example, mg/dL). In some embodiments, the baseline glucose measurement comprises a baseline glucose concentration. In some embodiments, the baseline glucose measurement is a baseline circulating glucose measurement. In some embodiments, the baseline glucose measurement is obtained by an assay such as an immunoassay, a colorimetric assay, or a fluorescence assay.

[0225] In some embodiments, the baseline glucose measurement comprises a baseline glucose tolerance test. In some embodiments, the baseline glucose tolerance test comprises administering glucose to the subject, and then obtaining multiple baseline glucose measurements overtime after administering the glucose to the subject. In some embodiments, the glucose is administered orally. In some embodiments, the glucose is administered by injection. In some embodiments, the multiple baseline glucose measurements are integrated into a baseline glucose area under the curve (AUC) measurement. In some embodiments, the baseline glucose tolerance test is performed on the subject in a fasted state such as after an overnight fast. In some embodiments, the baseline glucose measurement comprises a baseline glucose measurement other than a baseline glucose tolerance test.

[0226] In some embodiments, the baseline measurement is a baseline insulin measurement. In some embodiments, the baseline insulin measurement is a baseline insulin sensitivity measurement. In some embodiments, the baseline insulin sensitivity measurement is obtained using a glucose clamp technique such as a hyperinsulinemic euglycemic clamp. In some embodiments, the baseline insulin measurement is a baseline insulin concentration. In some embodiments, the baseline insulin measurement comprises a baseline insulin concentration. In some embodiments, the baseline insulin measurement is a baseline circulating insulin measurement. In some embodiments, the baseline insulin measurement is obtained by an assay such as an immunoassay (for example, an ELISA or an immunoblot), a colorimetric assay, or a fluorescence assay. In some embodiments, the baseline insulin sensitivity measurement comprises a baseline glucose tolerance test. In some embodiments, the baseline insulin sensitivity measurement comprises a baseline insulin sensitivity measurement other than a baseline glucose tolerance test.

[0227] In some embodiments, the baseline insulin measurement comprises a baseline insulin response test. In some embodiments, the baseline insulin response test comprises administering glucose to the subject and then obtaining multiple baseline insulin measurements overtime after administering the glucose to the subject. In some embodiments, the glucose is administered orally. In some embodiments, the glucose is administered by injection. In some embodiments, the multiple baseline insulin measurements are integrated into a baseline insulin AUC measurement. In some embodiments, the baseline insulin response test is performed on the subject in a fasted state such as after an overnight fast.

[0228] In some embodiments, the baseline insulin measurement comprises a baseline glucose response test. In some embodiments, the baseline glucose response test comprises administering insulin to the subject, and then obtaining multiple baseline glucose measurements over time after administering the insulin to the subject. In some embodiments, the insulin is administered by injection. In some embodiments, the multiple baseline glucose measurements are integrated into a baseline glucose AUC measurement. In some embodiments, the multiple baseline glucose measurements are obtained with a glucometer. In some embodiments, the glucose response test is performed on the subject in a fasted state such as after an overnight fast. In some embodiments, the glucose response test is performed on the subject after administering food, drink, or glucose to the subject.

[0229] In some embodiments, the baseline measurement is a baseline triglyceride measurement. In some embodiments, the baseline triglyceride measurement is a baseline triglyceride concentration (for example, mg/dL). In some embodiments, the baseline triglyceride measurement is a baseline circulating triglyceride measurement. In some embodiments, the baseline triglyceride measurement is obtained by an assay such as an immunoassay, a colorimetric assay, a chromatography assay, or a fluorescence assay.

[0230] In some embodiments, the baseline measurement is a baseline cholesterol measurement. In some embodiments, the baseline cholesterol measurement is a baseline cholesterol concentration. In some embodiments, the baseline cholesterol concentration is a baseline total cholesterol concentration. In some embodiments, the baseline cholesterol measurement is a baseline circulating cholesterol measurement. In some embodiments, the baseline cholesterol measurement is obtained by an assay such as an immunoassay, a colorimetric assay, or a fluorescence assay. In some embodiments, the baseline cholesterol measurement is a baseline low density lipoprotein (LDL) measurement. In some embodiments, the baseline cholesterol measurement is a baseline LDL cholesterol measurement. In some embodiments, the baseline cholesterol measurement is a baseline very low density lipoprotein (VLDL) measurement.

[0231] In some embodiments, the baseline cholesterol measurement is a baseline non-LDL cholesterol measurement. In some embodiments, the baseline measurement is a baseline HDL measurement. In some embodiments, the baseline HDL measurement is a baseline HDL concentration. In some embodiments, the baseline HDL measurement is indicated relative to a baseline total cholesterol measurement. In some embodiments, the baseline HDL measurement is a baseline circulating HDL measurement. In some embodiments, the baseline HDL measurement is obtained by an assay such as an immunoassay, a colorimetric assay, a chromatography assay, or a fluorescence assay.

[0232] In some embodiments, the baseline measurement is a baseline hemoglobin A1C measurement. In some embodiments, the baseline hemoglobin A1C measurement is a baseline hemoglobin A1C concentration. In some embodiments, the baseline hemoglobin A1C measurement is a baseline circulating hemoglobin A1C measurement. In some embodiments, the baseline hemoglobin A1C measurement is obtained by an assay such as an immunoassay, a colorimetric assay, a fluorescence assay, or HPLC. The baseline hemoglobin A1C measurement may be indicative of a healthy normal A1C measurement. The healthy normal hemoglobin A1C measurement may be below 48 mmol/mol (6.5 DCCT %). The healthy normal hemoglobin A1C measurement may be below 53 mmol/mol (7.0 DCCT %). The baseline hemoglobin A1C measurement may be indicative of diabetes of pre-diabetes. A baseline hemoglobin A1C measurement above 48 mmol/mol, or above 53 mmol/mol may indicate diabetes of pre-diabetes. The baseline hemoglobin A1C measurement may be indicative of diabetes. The baseline hemoglobin A1C measurement may be indicative of pre-diabetes. In some cases, the baseline hemoglobin A1C measurement is below 5.7 DCCT % (e.g. indicative of a normal healthy diagnosis). In some cases, the baseline hemoglobin A1C measurement is between 5.7 and 6.4 DCCT % (e.g. indicative of prediabetes). In some cases, the baseline hemoglobin A1C measurement is above 6.4 DCCT % (e.g. indicative of diabetes).

[0233] In some embodiments, the baseline measurement is a baseline GGT measurement. In some embodiments, the baseline GGT measurement is a baseline GGT concentration. In some embodiments, the baseline GGT measurement is a baseline circulating GGT measurement. In some embodiments, the baseline GGT measurement is obtained by an assay such as an immunoassay, a colorimetric assay, a chromatography assay, or a fluorescence assay.

[0234] In some embodiments, the baseline measurement is a baseline waist or hip measurement. In some embodiments, the baseline waist or hip measurement is a baseline waist or hip circumference measurement. In some embodiments, the baseline waist or hip measurement is a baseline waist circumference measurement. In some embodiments, the baseline waist or hip measurement is a baseline hip circumference measurement. In some embodiments, the baseline waist or hip measurement is a baseline waist-hip ratio (WHR). In some embodiments, the baseline waist or hip circumference measurement is expressed in inches or centimeters. In some embodiments, baseline waist or hip measurement is measured using a measuring tape.

[0235] In some embodiments, the baseline measurement is a baseline body fat percentage. A baseline body fat percentage may be obtained using underwater weighing, whole-body air displacement plethysmography, near-infrared interactance, dual energy X-ray absorptiometry, bioelectrical impedance, or a skinfold test.

[0236] In some embodiments, the baseline measurement is a baseline body mass measurement. In some embodiments, the baseline body mass measurement is a baseline body weight measurement. In some embodiments, the baseline body mass measurement is a baseline body mass index (BMI). BMI may be defined as a body mass divided by the square of body height, and may be expressed in units of kg/m². Body mass may be obtained using a scale. Body height may be measured using a ruler or a measuring tape. Body height may include the height of a standing subject. Body height may include a distance from the bottom of a subject's feet to the top of the subject's head. BMI may include BMI prime. The subject may have a baseline BMI in a range exemplified in Table 4.

TABLE 4
BMI Examples

| | BMI (kg/m²) | | BMI Prime | |
|---|---|---|---|---|
| Category | from | to | from | to |
| Very severely underweight | | 15 | | 0.6 |
| Severely underweight | 15 | 16 | 0.6 | 0.64 |
| Underweight | 16 | 18.5 | 0.64 | 0.74 |
| Normal (healthy weight) | 18.5 | 25 | 0.74 | 1 |
| Overweight | 25 | 30 | 1 | 1.2 |
| Obese Class I (Moderately obese) | 30 | 35 | 1.2 | 1.4 |
| Obese Class II (Severely obese) | 35 | 40 | 1.4 | 1.6 |
| Obese Class III (Very severely obese) | 40 | | 1.6 | |

[0237] In some embodiments, the baseline measurement is a baseline MS4A4E protein measurement. In some embodiments, the baseline MS4A4E protein measurement comprises a baseline MS4A4E protein level. In some embodiments, the baseline MS4A4E protein level is indicated as a mass or percentage of MS4A4E protein per sample weight. In some embodiments, the baseline MS4A4E protein level is indicated as a mass or percentage of MS4A4E protein per sample volume. In some embodiments, the baseline MS4A4E protein level is indicated as a mass or percentage of MS4A4E protein per total protein within the sample. In some embodiments, the baseline MS4A4E protein measurement is obtained by an assay such as an immunoassay, a colorimetric assay, or a fluorescence assay.

[0238] In some embodiments, the baseline measurement is a baseline MS4A4E mRNA measurement. In some embodiments, the baseline MS4A4E mRNA measurement comprises a baseline MS4A4E mRNA level. In some embodiments, the baseline MS4A4E mRNA level is indicated as an amount or percentage of MS4A4E mRNA per sample weight. In some embodiments, the baseline MS4A4E mRNA level is indicated as an amount or percentage of MS4A4E mRNA per sample volume. In some embodiments, the baseline MS4A4E mRNA level is indicated as an amount or percentage of MS4A4E mRNA per total mRNA within the sample. In some embodiments, the baseline MS4A4E mRNA level is indicated as an amount or percentage of MS4A4E mRNA per total nucleic acids within the sample. In some embodiments, the baseline MS4A4E mRNA level is indicated relative to another mRNA level, such as an mRNA level of a housekeeping gene, within the sample. In some embodiments, the baseline MS4A4E mRNA measurement is obtained by an assay such as a polymerase chain reaction (PCR) assay. In some embodiments, the PCR comprises quantitative PCR (qPCR). In some embodiments, the PCR comprises reverse transcription of the MS4A4E mRNA.

[0239] Some embodiments of the methods described herein include obtaining a sample from a subject. In some embodiments, the baseline measurement is obtained in a sample obtained from the subject. In some embodiments, the sample is obtained from the subject prior to administration or treatment of the subject with a composition described herein. In some embodiments, a baseline measurement is obtained in a sample obtained from the subject prior to administering the composition to the subject. In some embodiments, the sample is obtained from the subject in a fasted state. In some embodiments, the sample is obtained from the subject after an overnight fasting period. In some embodiments, the sample is obtained from the subject in a fed state.

[0240] In some embodiments, the sample comprises a fluid. In some embodiments, the sample is a fluid sample. In some embodiments, the sample is a blood, plasma, or serum sample. For example, a baseline blood ALT, blood AST, blood triglyceride, blood HDL, or blood hemoglobin A1C measurement may be obtained in a whole blood, serum, or plasma sample. In some embodiments, the sample comprises blood. In some embodiments, the sample is a blood sample. In some embodiments, the sample is a whole-blood sample. In some embodiments, the blood is fractionated or centrifuged. In some embodiments, the sample comprises plasma. In some embodiments, the sample is a plasma sample. A blood sample may be a plasma sample. In some embodiments, the sample comprises serum. In some embodiments, the sample is a serum sample. A blood sample may be a serum sample.

[0241] In some embodiments, the sample comprises a tissue. In some embodiments, the sample is a tissue sample. In some embodiments, the sample comprises liver tissue. In some embodiments, the sample is a liver sample. For example, the baseline MS4A4E mRNA measurement, or the baseline MS4A4E protein measurement, may be obtained in a liver sample from the subject. The liver tissue or liver sample may include liver cells. In some embodiments, the liver tissue may comprise hepatocytes. In some embodiments, the sample comprises adipose tissue. In some embodiments, the sample is an adipose sample. In some embodiments, the sample comprises adipocytes.

[0242] In some embodiments, the sample includes cells. For example, the sample may include liver tissue cells. The cells may comprise or consist of Kupffer cells. The cells may comprise or consist of hepatocytes. The cells may comprise or consist of fat cells. The cells may comprise or consist of adipocytes. The cells may comprise or consist of macrophages. The cells may comprise or consist of tissue macrophages.

### D. Effects

[0243] In some embodiments, the composition or administration of the composition affects a measurement such as a liver fat percentage measurement, a liver fibrosis score, a NAFLD activity score, a blood alanine aminotransferase (ALT) measurement, a blood aspartate aminotransferase (AST) measurement, a blood gamma-glutamyl transferase (GGT) measurement, a blood triglyceride measurement, an HDL cholesterol measurement, a non-HDL measurement, a blood hemoglobin A1C measurement, a body weight, a BMI, a waist circumference measurement, a hip circumference measurement, a waist-hip ratio, a insulin measurement, a glucose measurement, a body fat percentage measurement, a MS4A4E protein measurement, or a MS4A4E mRNA measurement, relative to the baseline measurement.

[0244] Some embodiments of the methods described herein include obtaining the measurement from a subject. For example, the measurement may be obtained from the subject after treating the subject. In some embodiments, the measurement is obtained in a second sample (such as a fluid or tissue sample described herein) obtained from the subject after the composition is administered to the subject. In some embodiments, the measurement is an indication that the disorder has been treated.

[0245] In some embodiments, the measurement is obtained directly from the subject. In some embodiments, the measurement is obtained noninvasively using an imaging device. In some embodiments, the measurement is obtained in a second sample from the subject. In some embodiments, the measurement is obtained in one or more histological tissue sections. In some embodiments, the measurement is obtained by performing an assay on the second sample obtained from the subject. In some embodiments, the measurement is obtained by an assay such as an immunoassay, a colorimetric assay, a fluorescence assay, or a chromatography assay. In some embodiments, the measurement is obtained by PCR. In some embodiments, the measurement is obtained by histology. In some embodiments, the measurement is obtained by observation. In some embodiments, additional measurements are made, such as in a 3rd sample, a 4th sample, or a fifth sample.

[0246] In some embodiments, the measurement is obtained within 1 hour, within 2 hours, within 3 hours, within 4 hours, within 5 hours, within 6 hours, within 12 hours, within 18 hours, or within 24 hours after the administration of the composition. In some embodiments, the measurement is obtained within 1 day, within 2 days, within 3 days, within 4 days, within 5 days, within 6 days, or within 7 days after the administration of the composition. In some embodiments, the measurement is obtained within 1 week, within 2 weeks, within 3 weeks, within 1 month, within 2 months, within 3 months, within 6 months, within 1 year, within 2 years, within 3 years, within 4 years, or within 5 years after the administration of the composition. In some embodiments, the measurement is obtained after 1 hour, after 2 hours, after 3 hours, after 4 hours, after 5 hours, after 6 hours, after 12 hours, after 18 hours, or after 24 hours after the administration of the composition. In some embodiments, the measurement is obtained after 1 day, after 2 days, after 3 days, after 4 days, after 5 days, after 6 days, or after 7 days after the administration of the composition. In some embodiments, the measurement is obtained after 1 week, after 2 weeks, after 3 weeks, after 1 month, after 2 months, after 3 months, after 6 months, after 1 year, after 2 years, after 3 years, after 4 years, or after 5 years, following the administration of the composition.

[0247] In some embodiments, the composition reduces the measurement relative to the baseline measurement. In some embodiments, the reduction is measured in a second tissue sample obtained from the subject after administering the composition to the subject. In some embodiments, the reduction is measured directly in the subject after administering the composition to the subject. In some embodiments, the measurement is decreased by about 2.5% or more, about 5% or more, or about 7.5% or more, relative to the baseline measurement. In some embodiments, the measurement is decreased by about 10% or more, relative to the baseline measurement. In some embodiments, the measurement is decreased by about 20% or more, about 30% or more, about 40% or more, about 50% or more, about 60% or more, about 70% or more, about 80% or more, about 90% or more, relative to the baseline measurement. In some embodiments, the measurement is decreased by no more than about 2.5%, no more than about 5%, or no more than about 7.5%, relative to the baseline measurement. In some embodiments, the measurement is decreased by no more than about 10%, relative to the baseline measurement. In some embodiments, the measurement is decreased by no more than about 20%, no more than about 30%, no more than about 40%, no more than about 50%, no more than about 60%, no more than about 70%, no more than about 80%, no more than about 90%, or about 100% relative to the baseline measurement. In some embodiments, the measurement is decreased by 2.5%, 5%, 7.5%, 10%, 20%, 30%, 40%, 50%, 60%, 70%, 80%, 90%, or 100%, or by a range defined by any of the two aforementioned percentages.

[0248] In some embodiments, the composition increases the measurement relative to the baseline measurement. In some embodiments, the increase is measured in a second tissue sample obtained from the subject after administering the composition to the subject. In some embodiments, the increase is measured directly in the subject after administering the composition to the subject. In some embodiments, the measurement is increased by about 2.5% or more, about 5% or more, or about 7.5% or more, relative to the baseline measurement. In some embodiments, the measurement is increased by about 10% or more, relative to the baseline measurement. In some embodiments, the measurement is increased by about 20% or more, about 30% or more, about 40% or more, about 50% or more, about 60% or more, about 70% or more, about 80% or more, about 90% or more, relative to the baseline measurement. In some embodiments, the measurement is increased by about 100% or more, increased by about 250% or more, increased by about 500% or more, increased by about 750% or more, or increased by about 1000% or more, relative to the baseline measurement. In some embodiments, the measurement is increased by no more than about 2.5%, no more than about 5%, or no more than about 7.5%, relative to the baseline measurement. In some embodiments, the measurement is increased by no more than about 10%, relative to the baseline measurement. In some embodiments, the measurement is increased by no more than about 20%, no more than about 30%, no more than about 40%, no more than about 50%, no more than about 60%, no more than about 70%, no more than about 80%, no more than about 90%, or no more than about 100% relative to the baseline measurement. In some embodiments, the measurement is increased by no more than about 100%, increased by no more than about 250%, increased by no more than about 500%, increased by no more than about 750%, or increased by no more than about 1000%, relative to the baseline measurement. In some embodiments, the measurement is increased by 2.5%, 5%, 7.5%, 10%, 20%, 30%, 40%, 50%, 60%, 70%, 80%, 90%, 100%, 250%, 500%, 750%, or 1000%, or by a range defined by any of the two aforementioned percentages.

[0249] In some embodiments, the measurement is a liver steatosis measurement. In some embodiments, the liver steatosis measurement is a liver fat percentage (LFP) measurement. In some embodiments, the measurement is a LFP measurement. In some embodiments, the LFP measurement is indicated as a mass/mass percentage of fat/total tissue. In some embodiments, the LFP measurement is indicated as a mass/volume percentage of fat/total tissue. In some embodiments, the LFP measurement is indicated as a volume/mass percentage of fat/total tissue. In some embodiments, the LFP measurement is indicated as a volume/volume percentage of fat/total tissue. In some embodiments, the LFP measurement is indicated as a score. In some embodiments, the LFP measurement is obtained noninvasively. In some embodiments, the LFP measurement is obtained by a medical imaging device. In some embodiments, the LFP measurement is obtained by a device such as a medical resonance imaging (MRI) device, a magnetic resonance spectroscopy device, a computed tomography device, a controlled attenuation parameter (CAP), a transient elastography device, or an ultrasound device. In some embodiments, the LFP measurement is obtained in a second liver sample. In some embodiments, the LFP measurement comprises a liver triglyceride measurement. In some embodiments, the LFP measurement is obtained by an assay such as an immunoassay, a colorimetric assay, or a fluorescence assay. In some embodiments, the LFP measurement or the LFP measurement is obtained using a scoring system upon a visual inspection of a sample such as a histological sample. In some embodiments, the LFP measurement or the LFP measurement is obtained using a stain with an affinity to fats, such as a lysochrome diazo dye.

[0250] In some embodiments, the composition reduces the LFP measurement relative to the baseline LFP measurement. In some embodiments, the reduced LFP is measured in a second liver sample obtained from the subject after administering the composition to the subject. In some embodiments, the reduced LFP is measured directly in the subject after administering the composition to the subject. In some embodiments, the LFP measurement is decreased by about 2.5% or more, about 5% or more, or about 7.5% or more, relative to the baseline LFP measurement. In some embodiments, the LFP measurement is decreased by about 10% or more, relative to the baseline LFP measurement. In some embodiments, the LFP measurement is decreased by about 20% or more, about 30% or more, about 40% or more, about 50% or more, about 60% or more, about 70% or more, about 80% or more, about 90% or more, relative to the baseline LFP measurement. In some embodiments, the LFP measurement is decreased by no more than about 2.5%, no more than about 5%, or no more than about 7.5%, relative to the baseline LFP measurement. In some embodiments, the LFP measurement is decreased by no more than about 10%, relative to the baseline LFP measurement. In some embodiments, the LFP measurement is decreased by no more than about 20%, no more than about 30%, no more than about 40%, no more than about 50%, no more than about 60%, no more than about 70%, no more than about 80%, no more than about 90%, or no more than about 100% relative to the baseline LFP measurement. In some embodiments, the LFP measurement is decreased by 2.5%, 5%, 7.5%, 10%, 20%, 30%, 40%, 50%, 60%, 70%, 80%, 90%, or 100%, or by a range defined by any of the two aforementioned percentages.

[0251] In some embodiments, the measurement is a liver fibrosis measurement. In some embodiments, the liver fibrosis measurement is a liver fibrosis score (LFS). In some embodiments, the LFS comprises a score of 0, 1, 2, 3, or 4, or a range of scores defined by any two of the aforementioned numbers. In some embodiments, the LFS comprises a score of 0-4. In some embodiments, the LFS is obtained using a scoring system exemplified in Table 3. In some embodiments, the LFS measurement is obtained noninvasively. In some embodiments, the LFS measurement is obtained by a medical imaging device such as a vibration-controlled transient elastography (VCTE) device, a shear wave elastography device, a medical resonance imaging (MRI) device, a magnetic resonance spectroscopy device, a computed tomography device, or an ultrasound device. In some embodiments, the LFS measurement is obtained in a second liver sample. In some embodiments, the LFS is obtained by an assay such as an immunoassay, a colorimetric assay, or a fluorescence assay. In some embodiments, the LFS is obtained using one or more indirect markers or measures of liver fibrosis such as an aspartate aminotransferase-to-platelet ratio index (APRI), a Fibrosis-4 (FIB-4) index, a FibroIndex, a Forms Index, a Hepascore, or a FibroTest. In some embodiments, the LFS is obtained using one or more indirect markers or measures of liver fibrosis such as a FIBROSpect test or a FIBROSpect II test. In some embodiments, the LFS is obtained by RT-qPCR or RNA sequencing of one or more fibrosis-related genes such as a collagen gene. In some embodiments, the LFS or the LFS is obtained using a scoring system upon a visual inspection of a sample such as a histological sample. In some embodiments, the LFS or the LFS is obtained using a stain with an affinity to collagen.

[0252] In some embodiments, the composition reduces the LFS relative to the baseline LFS. In some embodiments, the reduced LFS is measured in a second liver sample obtained from the subject after administering the composition to the subject. In some embodiments, the reduced LFS is measured directly in the subject after administering the composition to the subject. In some embodiments, the LFS is decreased by 1 relative to the baseline LFS. In some embodiments, the LFS is decreased by 2 relative to the baseline LFS. In some embodiments, the LFS is decreased by 3 relative to the baseline LFS. In some embodiments, the LFS is decreased by 4 relative to the baseline LFS. In some embodiments, the LFS is decreased by 1 or more, relative to the baseline LFS. In some embodiments, the LFS is decreased by 2 or more, relative to the baseline LFS. In some embodiments, the LFS is decreased by 3 more, relative to the baseline LFS. In some embodiments, the LFS is decreased by no more than 1, relative to the baseline LFS. In some embodiments, the LFS is decreased by no more than 2, relative to the baseline LFS. In some embodiments, the LFS is decreased by no more than 3, relative to the baseline LFS. In some embodiments, the LFS is decreased by no more than 4, relative to the baseline LFS. In some embodiments, the LFS is decreased by 1, 2, 3, or 4, or by a range defined by any of the two aforementioned numbers.

[0253] In some embodiments, the measurement is a non-alcoholic fatty liver disease (NAFLD) activity score. In some embodiments, the NAFLD activity score comprises a numerical value such as a number of points. In some embodiments, the numerical value is 0, 1, 2, 3, 4, 5, 6, 7, or 8, or a range defined by any two of the aforementioned numerical values. In some embodiments, the numerical value is 0-8. In some embodiments, the NAFLD activity score comprises a steatosis grade such as a liver fat percentage. In some embodiments, a steatosis grade<5% comprises 0 points in the NAFLD activity score. In some embodiments, a steatosis grade of 5-33% comprises 1 point in the NAFLD activity score. In some embodiments, a steatosis grade of 34-66% comprises 2 points in the NAFLD activity score. In some embodiments, a steatosis grade of >66% comprises 3 points in the NAFLD activity score. In some embodiments, the NAFLD activity score comprises a lobular inflammation grade. In some embodiments, the lobular inflammation grade comprises an assessment of inflammatory foci. In some embodiments, a lobular inflammation grade comprising 0 foci comprises 0 points in the NAFLD activity score. In some embodiments, a lobular inflammation grade comprising 1 focus per a field (such as a 20× field or a 200× field) comprises 1 point in the NAFLD activity score. In some embodiments, a lobular inflammation grade comprising 2-4 foci per field comprises 2 points in the NAFLD activity score. In some embodiments, a lobular inflammation grade comprising >4 foci per field comprises 3 points in the NAFLD activity score. In some embodiments, the NAFLD activity score comprises a liver cell injury grade such as an amount of ballooning cells. In some embodiments, a liver cell injury comprising no ballooning cells comprises 0 points in the NAFLD activity score. In some embodiments, a liver cell injury comprising some new balloon cells comprises 1 point in the NAFLD activity score. In some embodiments, a liver cell injury comprising many ballooning cells or prominent ballooning comprises 2 points in the NAFLD activity score. In some embodiments, the NAFLD activity score is obtained invasively, based on histology, and/or in a liver biopsy.

[0254] In some embodiments, the composition reduces the NAFLD activity score relative to the baseline NAFLD activity score. In some embodiments, the reduced NAFLD activity score is measured in a second liver sample obtained from the subject after administering the composition to the subject. In some embodiments, the NAFLD activity score is decreased by 1 relative to the baseline NAFLD activity score. In some embodiments, the NAFLD activity score is decreased by 2 relative to the baseline NAFLD activity score. In some embodiments, the NAFLD activity score is decreased by 3 relative to the baseline NAFLD activity score. In some embodiments, the NAFLD activity score is decreased by 4 relative to the baseline NAFLD activity score. In some embodiments, the NAFLD activity score is decreased by 5 relative to the baseline NAFLD activity score. In some embodiments, the NAFLD activity score is decreased by 6 relative to the baseline NAFLD activity score. In some embodiments, the NAFLD activity score is decreased by 7 relative to the baseline NAFLD activity score. In some embodiments, the NAFLD activity score is decreased by 8 relative to the baseline NAFLD activity score. In some embodiments, the NAFLD activity score is decreased by 1 or more, relative to the baseline NAFLD activity score. In some embodiments, the NAFLD activity score is decreased by 2 or more, 3 or more, 4 or more, 5 or more, 6 or more, 7 or more, or 8 or more, relative to the baseline NAFLD activity score. In some embodiments, the NAFLD activity score is decreased by no more than 1, no more than 2, no more than 3, no more than 4, no more than 5, no more than 6, no more than 7, or no more than 8, relative to the baseline NAFLD activity score. In some embodiments, the NAFLD activity score is decreased by 1, 2, 3, 4, 5, 6, 7, or 8, or by a range defined by any of the two aforementioned numbers.

[0255] In some embodiments, the measurement is a liver enzyme measurement. In some embodiments, the liver enzyme measurement is an alanine aminotransferase (ALT) measurement. In some embodiments, the liver enzyme measurement is an aspartate aminotransferase (AST) measurement. In some embodiments, the liver enzyme measurement comprises an ALT/AST ratio, or comprises an AST/ALT ratio.

[0256] In some embodiments, the measurement is an alanine aminotransferase (ALT) measurement. In some embodiments, the ALT measurement is an ALT concentration (for example, Units/dL). In some embodiments, the ALT measurement is a circulating ALT measurement, for example, a blood, serum, or plasma ALT level. In some embodiments, the ALT measurement is obtained by an assay such as an immunoassay, a colorimetric assay, or a fluorescence assay.

[0257] In some embodiments, the composition reduces the ALT measurement relative to the baseline ALT measurement. In some embodiments, the reduced ALT is measured in a second blood sample, plasma sample, or serum sample obtained from the subject after administering the composition to the subject. In some embodiments, the ALT measurement is decreased by about 2.5% or more, about 5% or more, or about 7.5% or more, relative to the baseline ALT measurement. In some embodiments, the ALT measurement is decreased by about 10% or more, relative to the baseline ALT measurement. In some embodiments, the ALT measurement is decreased by about 20% or more, about 30% or more, about 40% or more, about 50% or more, about 60% or more, about 70% or more, about 80% or more, about 90% or more, relative to the baseline ALT measurement. In some embodiments, the ALT measurement is decreased by no more than about 2.5%, no more than about 5%, or no more than about 7.5%, relative to the baseline ALT measurement. In some embodiments, the ALT measurement is decreased by no more than about 10%, relative to the baseline ALT measurement. In some embodiments, the ALT measurement is decreased by no more than about 20%, no more than about 30%, no more than about 40%, no more than about 50%, no more than about 60%, no more than about 70%, no more than about 80%, no more than about 90%, or no more than about 100% relative to the baseline ALT measurement. In some embodiments, the ALT measurement is decreased by 2.5%, 5%, 7.5%, 10%, 20%, 30%, 40%, 50%, 60%, 70%, 80%, 90%, or 100%, or by a range defined by any of the two aforementioned percentages.

[0258] In some embodiments, the measurement is an aspartate aminotransferase (AST) measurement. In some embodiments, the AST measurement is an AST concentration (for example, Units/dL). In some embodiments, the AST measurement is a circulating AST measurement, for example, a blood, serum, or plasma AST level. In some embodiments, the AST measurement is obtained by an assay such as an immunoassay, a colorimetric assay, or a fluorescence assay.

[0259] In some embodiments, the composition reduces the AST measurement relative to the baseline AST measurement. In some embodiments, the reduced AST is measured in a second blood sample, plasma sample, or serum sample obtained from the subject after administering the composition to the subject. In some embodiments, the AST measurement is decreased by about 2.5% or more, about 5% or more, or about 7.5% or more, relative to the baseline AST measurement. In some embodiments, the AST measurement is decreased by about 10% or more, relative to the baseline AST measurement. In some embodiments, the AST measurement is decreased by about 20% or more, about 30% or more, about 40% or more, about 50% or more, about 60% or more, about 70% or more, about 80% or more, about 90% or more, relative to the baseline AST measurement. In some embodiments, the AST measurement is decreased by no more than about 2.5%, no more than about 5%, or no more than about 7.5%, relative to the baseline AST measurement. In some embodiments, the AST measurement is decreased by no more than about 10%, relative to the baseline AST measurement. In some embodiments, the AST measurement is decreased by no more than about 20%, no more than about 30%, no more than about 40%, no more than about 50%, no more than about 60%, no more than about 70%, no more than about 80%, no more than about 90%, or no more than about 100% relative to the baseline AST measurement. In some embodiments, the AST measurement is decreased by 2.5%, 5%, 7.5%, 10%, 20%, 30%, 40%, 50%, 60%, 70%, 80%, 90%, or 100%, or by a range defined by any of the two aforementioned percentages.

[0260] In some embodiments, the measurement is a waist or hip measurement. In some embodiments, the waist or hip measurement is a waist or hip circumference measurement. In some embodiments, the waist or hip measurement is a waist circumference measurement. In some embodiments, the waist or hip measurement is a hip circumference measurement. In some embodiments, the waist or hip measurement is a waist-hip ratio (WHR). In some embodiments, the waist or hip circumference measurement is expressed in inches or centimeters. In some embodiments, waist or hip measurement is measured using a measuring tape.

[0261] In some embodiments, the composition reduces the waist or hip measurement relative to the baseline waist or hip measurement. In some embodiments, the reduction is measured directly in the subject after administering the composition to the subject. In some embodiments, the waist or hip measurement is decreased by about 2.5% or more, about 5% or more, or about 7.5% or more, relative to the baseline waist or hip measurement. In some embodiments, the waist or hip measurement is decreased by about 10% or more, relative to the baseline waist or hip measurement. In some embodiments, the waist or hip measurement is decreased by about 20% or more, about 30% or more, about 40% or more, about 50% or more, about 60% or more, about 70% or more, about 80% or more, about 90% or more, relative to the baseline waist or hip measurement. In some embodiments, the waist or hip measurement is decreased by no more than about 2.5%, no more than about 5%, or no more than about 7.5%, relative to the baseline waist or hip measurement. In some embodiments, the waist or hip measurement is decreased by no more than about 10%, relative to the baseline waist or hip measurement. In some embodiments, the waist or hip measurement is decreased by no more than about 20%, no more than about 30%, no more than about 40%, no more than about 50%, no more than about 60%, no more than about 70%, no more than about 80%, or no more than about 90% relative to the baseline waist or hip measurement. In some embodiments, the waist or hip measurement is decreased by 2.5%, 5%, 7.5%, 10%, 20%, 30%, 40%, 50%, 60%, 70%, 80%, or 90%, or by a range defined by any of the two aforementioned percentages.

[0262] In some embodiments, the measurement is a GGT measurement. In some embodiments, the GGT measurement is a GGT concentration. In some embodiments, the GGT measurement is a circulating GGT measurement. In some embodiments, the GGT measurement is obtained by an assay such as an immunoassay, a colorimetric assay, a chromatography assay, or a fluorescence assay.

[0263] In some embodiments, the composition reduces the gamma-glutamyl transferase measurement relative to the baseline gamma-glutamyl transferase measurement. In some embodiments, the reduction is measured in a second fluid sample obtained from the subject after administering the composition to the subject. In some embodiments, the reduction is measured directly in the subject after administering the composition to the subject. In some embodiments, the gamma-glutamyl transferase measurement is decreased by about 2.5% or more, about 5% or more, or about 7.5% or more, relative to the baseline gamma-glutamyl transferase measurement. In some embodiments, the gamma-glutamyl transferase measurement is decreased by about 10% or more, relative to the baseline gamma-glutamyl transferase measurement. In some embodiments, the gamma-glutamyl transferase measurement is decreased by about 20% or more, about 30% or more, about 40% or more, about 50% or more, about 60% or more, about 70% or more, about 80% or more, about 90% or more, relative to the baseline gamma-glutamyl transferase measurement. In some embodiments, the gamma-glutamyl transferase measurement is decreased by no more than about 2.5%, no more than about 5%, or no more than about 7.5%, relative to the baseline gamma-glutamyl transferase measurement. In some embodiments, the gamma-glutamyl transferase measurement is decreased by no more than about 10%, relative to the baseline gamma-glutamyl transferase measurement. In some embodiments, the gamma-glutamyl transferase measurement is decreased by no more than about 20%, no more than about 30%, no more than about 40%, no more than about 50%, no more than about 60%, no more than about 70%, no more than about 80%, or no more than about 90% relative to the baseline gamma-glutamyl transferase measurement. In some embodiments, the gamma-glutamyl transferase measurement is decreased by 2.5%, 5%, 7.5%, 10%, 20%, 30%, 40%, 50%, 60%, 70%, 80%, or 90%, or by a range defined by any of the two aforementioned percentages.

[0264] In some embodiments, the measurement is a glucose measurement. In some embodiments, the glucose measurement is a glucose concentration (for example, mg/dL). In some embodiments, the glucose measurement comprises a glucose concentration. In some embodiments, the glucose measurement is a circulating glucose measurement. In some embodiments, the glucose measurement is obtained by an assay such as an immunoassay, a colorimetric assay, or a fluorescence assay. In some embodiments, the glucose measurement comprises a glucose tolerance test. In some embodiments, the glucose tolerance test comprises administering glucose to the subject, and then obtaining multiple glucose measurements over time after administering the glucose to the subject. In some embodiments, the glucose is administered orally. In some embodiments, the glucose is administered by injection. In some embodiments, the multiple glucose measurements are integrated into a glucose area under the curve (AUC) measurement. In some embodiments, the glucose tolerance test is performed on the subject in a fasted state such as after an overnight fast. In some embodiments, the glucose measurement comprises a glucose measurement other than a glucose tolerance test.

[0265] In some embodiments, the composition reduces the glucose measurement relative to the baseline glucose measurement. In some embodiments, the reduced glucose is measured in a second sample obtained from the subject after administering the composition to the subject. In some embodiments, the glucose measurement is decreased by about 2.5% or more, about 5% or more, or about 7.5% or more, relative to the baseline glucose measurement. In some embodiments, the glucose measurement is decreased by about 10% or more, relative to the baseline glucose measurement. In some embodiments, the glucose measurement is decreased by about 20% or more, about 30% or more, about 40% or more, about 50% or more, about 60% or more, about 70% or more, about 80% or more, or about 90% or more, relative to the baseline glucose measurement. In some embodiments, the glucose measurement is decreased by no more than about 2.5%, no more than about 5%, or no more than about 7.5%, relative to the baseline glucose measurement. In some embodiments, the glucose measurement is decreased by no more than about 10%, relative to the baseline glucose measurement. In some embodiments, the glucose measurement is decreased by no more than about 20%, no more than about 30%, no more than about 40%, no more than about 50%, no more than about 60%, no more than about 70%, no more than about 80%, or no more than about 90%, relative to the baseline glucose measurement. In some embodiments, the glucose measurement is decreased by 2.5%, 5%, 7.5%, 10%, 20%, 30%, 40%, 50%, 60%, 70%, 80%, or 90%, or by a range defined by any of the two aforementioned percentages.

[0266] In some embodiments, the measurement is a insulin measurement. In some embodiments, the insulin measurement is a insulin sensitivity measurement. In some embodiments, the insulin sensitivity measurement is obtained using a glucose clamp technique such as a hyperinsulinemic euglycemic clamp. In some embodiments, the insulin measurement is a insulin concentration. In some embodiments, the insulin measurement comprises a insulin concentration. In some embodiments, the insulin measurement is a circulating insulin measurement. In some embodiments, the insulin measurement is obtained by an assay such as an immunoassay (for example, an ELISA or an immunoblot), a colorimetric assay, or a fluorescence assay. In some embodiments, the insulin sensitivity measurement comprises a glucose tolerance test. In some embodiments, the insulin sensitivity measurement comprises a insulin sensitivity measurement other than a glucose tolerance test. In some embodiments, the insulin measurement comprises a insulin response test. In some embodiments, the insulin response test comprises administering glucose to the subject and then obtaining multiple insulin measurements over time after administering the glucose to the subject. In some embodiments, the glucose is administered orally. In some embodiments, the glucose is administered by injection. In some embodiments, the multiple insulin measurements are integrated into a insulin AUC measurement. In some embodiments, the insulin response test is performed on the subject in a fasted state such as after an overnight fast. In some embodiments, the insulin measurement comprises a glucose response test. In some embodiments, the glucose response test comprises administering insulin to the subject, and then obtaining multiple glucose measurements over time after administering the insulin to the subject. In some embodiments, the insulin is administered by injection. In some embodiments, the multiple glucose measurements are integrated into a glucose AUC measurement. In some embodiments, the multiple glucose measurements are obtained with a glucometer. In some embodiments, the glucose response test is performed on the subject in a fasted state such as after an overnight fast. In some embodiments, the glucose response test is performed on the subject after administering food, drink, or glucose to the subject.

[0267] In some embodiments, the composition reduces the insulin measurement relative to the baseline insulin measurement. In some embodiments, the reduced insulin is measured directly in the subject. In some embodiments, the reduced insulin is measured in a second sample obtained from the subject after administering the composition to the subject. In some embodiments, the insulin measurement is decreased by about 2.5% or more, about 5% or more, or about 7.5% or more, relative to the baseline insulin measurement. In some embodiments, the insulin measurement is decreased by about 10% or more, relative to the baseline insulin measurement. In some embodiments, the insulin measurement is decreased by about 20% or more, about 30% or more, about 40% or more, about 50% or more, about 60% or more, about 70% or more, about 80% or more, or about 90% or more, relative to the baseline insulin measurement. In some embodiments, the insulin measurement is decreased by no more than about 2.5%, no more than about 5%, or no more than about 7.5%, relative to the baseline insulin measurement. In some embodiments, the insulin measurement is decreased by no more than about 10%, relative to the baseline insulin measurement. In some embodiments, the insulin measurement is decreased by no more than about 20%, no more than about 30%, no more than about 40%, no more than about 50%, no more than about 60%, no more than about 70%, no more than about 80%, or no more than about 90%, relative to the baseline insulin measurement. In some embodiments, the insulin measurement is decreased by 2.5%, 5%, 7.5%, 10%, 20%, 30%, 40%, 50%, 60%, 70%, 80%, or 90%, or by a range defined by any of the two aforementioned percentages.

[0268] In some embodiments, the measurement is a triglyceride measurement. In some embodiments, the triglyceride measurement is a triglyceride concentration (for example, mg/dL). In some embodiments, the triglyceride measurement is a circulating triglyceride measurement. In some embodiments, the triglyceride measurement is obtained by an assay such as an immunoassay, a colorimetric assay, a chromatography assay, or a fluorescence assay.

[0269] In some embodiments, the composition reduces the triglyceride measurement relative to the baseline triglyceride measurement. In some embodiments, the composition reduces circulating triglycerides relative to the baseline triglyceride measurement. In some embodiments, the reduced triglycerides are measured in a second sample obtained from the subject after administering the composition to the subject. In some embodiments, the triglyceride measurement is decreased by about 2.5% or more, about 5% or more, or about 7.5% or more, relative to the baseline triglyceride measurement. In some embodiments, the triglyceride measurement is decreased by about 10% or more, relative to the baseline triglyceride measurement. In some embodiments, the triglyceride measurement is decreased by about 20% or more, about 30% or more, about 40% or more, about 50% or more, about 60% or more, about 70% or more, about 80% or more, or about 90% or more, relative to the baseline triglyceride measurement. In some embodiments, the triglyceride measurement is decreased by no more than about 2.5%, no more than about 5%, or no more than about 7.5%, relative to the baseline triglyceride measurement. In some embodiments, the triglyceride measurement is decreased by no more than about 10%, relative to the baseline triglyceride measurement. In some embodiments, the triglyceride measurement is decreased by no more than about 20%, no more than about 30%, no more than about 40%, no more than about 50%, no more than about 60%, no more than about 70%, no more than about 80%, or no more than about 90%, relative to the baseline triglyceride measurement. In some embodiments, the triglyceride measurement is decreased by 2.5%, 5%, 7.5%, 10%, 20%, 30%, 40%, 50%, 60%, 70%, 80%, or 90%, or by a range defined by any of the two aforementioned percentages.

[0270] In some embodiments, the measurement is a cholesterol measurement. In some embodiments, the cholesterol measurement is a total cholesterol measurement. In some embodiments, the cholesterol measurement is a cholesterol concentration. In some embodiments, the cholesterol concentration is a total cholesterol concentration. In some embodiments, the cholesterol measurement is a circulating cholesterol measurement. In some embodiments, the cholesterol measurement is a low density lipoprotein (LDL) measurement. In some embodiments, the cholesterol measurement is a LDL cholesterol measurement. In some embodiments, the cholesterol measurement is a very low density lipoprotein (VLDL) measurement. In some embodiments, the cholesterol measurement is obtained by an assay such as an immunoassay, a chromatography assay, a colorimetric assay, or a fluorescence assay. In some embodiments, the composition reduces the cholesterol measurement relative to the baseline cholesterol measurement. In some embodiments, the composition reduces circulating cholesterol relative to the baseline cholesterol measurement. In some embodiments, the reduced cholesterol is measured in a second sample obtained from the subject after administering the composition to the subject.

[0271] In some embodiments, the cholesterol measurement is decreased by about 2.5% or more, about 5% or more, or about 7.5% or more, relative to the baseline cholesterol measurement. In some embodiments, the cholesterol measurement is decreased by about 10% or more, relative to the baseline cholesterol measurement. In some embodiments, the cholesterol measurement is decreased by about 20% or more, about 30% or more, about 40% or more, about 50% or more, about 60% or more, about 70% or more, about 80% or more, or about 90% or more, relative to the baseline cholesterol measurement. In some embodiments, the cholesterol is decreased by no more than about 2.5%, no more than about 5%, or no more than about 7.5%, relative to the baseline cholesterol measurement. In some embodiments, the cholesterol is decreased by no more than about 10%, relative to the baseline cholesterol measurement. In some embodiments, the cholesterol is decreased by no more than about 20%, no more than about 30%, no more than about 40%, no more than about 50%, no more than about 60%, no more than about 70%, no more than about 80%, or no more than about 90%, relative to the baseline cholesterol measurement. In some embodiments, the cholesterol measurement is decreased by 2.5%, 5%, 7.5%, 10%, 20%, 30%, 40%, 50%, 60%, 70%, 80%, or 90%, or by a range defined by any of the two aforementioned percentages.

[0272] In some embodiments, the cholesterol measurement is a non-LDL cholesterol measurement. In some embodiments, the measurement is an HDL measurement. In some embodiments, the HDL measurement is an HDL concentration. In some embodiments, the HDL measurement is indicated relative to a total cholesterol measurement. In some embodiments, the HDL measurement is a circulating HDL measurement. In some embodiments, the HDL measurement is obtained by an assay such as an immunoassay, a colorimetric assay, a chromatography assay, or a fluorescence assay. In some embodiments, the composition increases the HDL measurement relative to the baseline HDL measurement. In some embodiments, the composition increases circulating HDL relative to the baseline HDL measurement. In some embodiments, the increased HDL is measured in a second sample obtained from the subject after administering the composition to the subject.

[0273] In some embodiments, the HDL measurement is increased by about 2.5% or more, about 5% or more, or about 7.5% or more, relative to the baseline HDL measurement. In some embodiments, the HDL measurement is increased by about 10% or more, relative to the baseline HDL measurement. In some embodiments, the HDL measurement is increased by about 20% or more, about 30% or more, about 40% or more, about 50% or more, about 60% or more, about 70% or more, about 80% or more, about 90% or more, or about 100% or more relative to the baseline HDL measurement. In some embodiments, the HDL measurement is increased by about 200% or more, about 300% or more, about 400% or more, about 500% or more, about 600% or more, about 700% or more, about 800% or more, about 900% or more, or about 1000% or more, relative to the baseline HDL measurement. In some embodiments, the HDL measurement is increased by no more than about 2.5%, no more than about 5%, or no more than about 7.5%, relative to the baseline HDL measurement. In some embodiments, the HDL measurement is increased by no more than about 10%, relative to the baseline HDL measurement. In some embodiments, the HDL measurement is increased by no more than about 20%, no more than about 30%, no more than about 40%, no more than about 50%, no more than about 60%, no more than about 70%, no more than about 80%, no more than about 90%, or no more than about 100% relative to the baseline HDL measurement. In some embodiments, the HDL measurement is increased by no more than about 200%, no more than about 300%, no more than about 400%, no more than about 500%, no more than about 600%, no more than about 700%, no more than about 800%, no more than about 900%, or no more than about 1000%, relative to the baseline HDL measurement. In some embodiments, the HDL measurement is increased by 2.5%, 5%, 7.5%, 10%, 20%, 30%, 40%, 50%, 60%, 70%, 80%, 90%, 100%, 200% 300%, 400%, 500%, 600%, 700%, 800%, 900%, 1000%, or by a range defined by any of the two aforementioned percentages.

[0274] In some embodiments, the measurement is a hemoglobin A1C measurement. In some embodiments, the hemoglobin A1C measurement is a hemoglobin A1C concentration. In some embodiments, the hemoglobin A1C measurement is a circulating hemoglobin A1C measurement. In some embodiments, the hemoglobin A1C measurement is obtained by an assay such as an immunoassay, a colorimetric assay, a fluorescence assay, or HPLC. The hemoglobin A1C measurement may be indicative of a healthy normal A1C measurement. The hemoglobin A1C measurement may be indicative of diabetes. The hemoglobin A1C measurement may be indicative of pre-diabetes.

[0275] In some embodiments, the composition reduces the hemoglobin A1C measurement relative to the baseline hemoglobin A1C measurement. In some embodiments, the reduction is measured in a second fluid sample obtained from the subject after administering the composition to the subject. In some embodiments, the reduction is measured directly in the subject after administering the composition to the subject. In some embodiments, the hemoglobin A1C measurement is decreased by about 2.5% or more, about 5% or more, or about 7.5% or more, relative to the baseline hemoglobin A b C measurement. In some embodiments, the hemoglobin A1C measurement is decreased by about 10% or more, relative to the baseline hemoglobin A b C measurement. In some embodiments, the hemoglobin Ab C measurement is decreased by about 20% or more, about 30% or more, about 40% or more, about 50% or more, about 60% or more, about 70% or more, about 80% or more, about 90% or more, relative to the baseline hemoglobin A1C measurement. In some embodiments, the hemoglobin A1C measurement is decreased by no more than about 2.5%, no more than about 5%, or no more than about 7.5%, relative to the baseline hemoglobin A1C measurement. In some embodiments, the hemoglobin A1C measurement is decreased by no more than about 10%, relative to the baseline hemoglobin A1C measurement. In some embodiments, the hemoglobin A1C measurement is decreased by no more than about 20%, no more than about 30%, no more than about 40%, no more than about 50%, no more than about 60%, no more than about 70%, no more than about 80%, or no more than about 90% relative to the baseline hemoglobin A1C measurement. In some embodiments, the hemoglobin A1C measurement is decreased by 2.5%, 5%, 7.5%, 10%, 20%, 30%, 40%, 50%, 60%, 70%, 80%, or 90%, or by a range defined by any of the two aforementioned percentages.

[0276] In some embodiments, the measurement is a body fat percentage. A body fat percentage may be obtained using underwater weighing, whole-body air displacement plethysmography, near-infrared interactance, dual energy X-ray absorptiometry, bioelectrical impedance, or a skinfold test.

[0277] In some embodiments, the composition reduces the body fat percentage measurement relative to the baseline body fat percentage measurement. In some embodiments, the reduction is measured on the subject after administering the composition to the subject. In some embodiments, the body fat percentage measurement is decreased by about 2.5% or more, about 5% or more, or about 7.5% or more, relative to the baseline body fat percentage measurement. In some embodiments, the body fat percentage measurement is decreased by about 10% or more, relative to the baseline body fat percentage measurement. In some embodiments, the body fat percentage measurement is decreased by about 20% or more, about 30% or more, about 40% or more, about 50% or more, about 60% or more, about 70% or more, about 80% or more, about 90% or more, relative to the baseline body fat percentage measurement. In some embodiments, the body fat percentage measurement is decreased by no more than about 2.5%, no more than about 5%, or no more than about 7.5%, relative to the baseline body fat percentage measurement. In some embodiments, the body fat percentage measurement is decreased by no more than about 10%, relative to the baseline body fat percentage measurement. In some embodiments, the body fat percentage measurement is decreased by no more than about 20%, no more than about 30%, no more than about 40%, no more than about 50%, no more than about 60%, no more than about 70%, no more than about 80%, or no more than about 90% relative to the baseline body fat percentage measurement. In some embodiments, the body fat percentage measurement is decreased by 2.5%, 5%, 7.5%, 10%, 20%, 30%, 40%, 50%, 60%, 70%, 80%, or 90%, or by a range defined by any of the two aforementioned percentages.

[0278] In some embodiments, the measurement is a body mass measurement. In some embodiments, the body mass measurement is a body weight measurement. In some embodiments, the body mass measurement is a body mass index (BMI). BMI may be defined as a body mass divided by the square of body height, and may be expressed in units of kg/m². Body mass may be obtained using a scale. Body height may be measured using a ruler or a measuring tape. Body height may include the height of a standing subject. Body height may include a distance from the bottom of a subject's feet to the top of the subject's head. BMI may include BMI prime. The subject may have a BMI in a range exemplified in Table 4.

[0279] In some embodiments, the composition reduces the body mass measurement relative to the baseline body mass measurement. In some embodiments, the reduction is measured on the subject after administering the composition to the subject. In some embodiments, the body mass measurement is decreased by about 2.5% or more, about 5% or more, or about 7.5% or more, relative to the baseline body mass measurement. In some embodiments, the body mass measurement is decreased by about 10% or more, relative to the baseline body mass measurement. In some embodiments, the body mass measurement is decreased by about 20% or more, about 30% or more, about 40% or more, about 50% or more, about 60% or more, about 70% or more, about 80% or more, about 90% or more, relative to the baseline body mass measurement. In some embodiments, the body mass measurement is decreased by no more than about 2.5%, no more than about 5%, or no more than about 7.5%, relative to the baseline body mass measurement. In some embodiments, the body mass measurement is decreased by no more than about 10%, relative to the baseline body mass measurement. In some embodiments, the body mass measurement is decreased by no more than about 20%, no more than about 30%, no more than about 40%, no more than about 50%, no more than about 60%, no more than about 70%, no more than about 80%, or no more than about 90% relative to the baseline body mass measurement. In some embodiments, the body mass measurement is decreased by 2.5%, 5%, 7.5%, 10%, 20%, 30%, 40%, 50%, 60%, 70%, 80%, or 90%, or by a range defined by any of the two aforementioned percentages.

[0280] In some embodiments, the measurement is an MS4A4E protein measurement. In some embodiments, the MS4A4E protein measurement comprises an MS4A4E protein level. In some embodiments, the MS4A4E protein level is indicated as a mass or percentage of MS4A4E protein per sample weight. In some embodiments, the MS4A4E protein level is indicated as a mass or percentage of MS4A4E protein per sample volume. In some embodiments, the MS4A4E protein level is indicated as a mass or percentage of MS4A4E protein per total protein within the sample. In some embodiments, the MS4A4E protein measurement is obtained by an assay such as an immunoassay, a colorimetric assay, or a fluorescence assay.

[0281] In some embodiments, the composition reduces the MS4A4E protein measurement relative to the baseline MS4A4E protein measurement. In some embodiments, the composition reduces tissue MS4A4E protein levels relative to the baseline MS4A4E protein measurement. In some embodiments, the reduced MS4A4E protein levels are measured in a second sample obtained from the subject after administering the composition to the subject.

[0282] In some embodiments, the MS4A4E protein measurement is decreased by about 2.5% or more, about 5% or more, or about 7.5% or more, relative to the baseline MS4A4E protein measurement. In some embodiments, the MS4A4E protein measurement is decreased by about 10% or more, relative to the baseline MS4A4E protein measurement. In some embodiments, the MS4A4E protein measurement is decreased by about 20% or more, about 30% or more, about 40% or more, about 50% or more, about 60% or more, about 70% or more, about 80% or more, about 90% or more, or about 100%, relative to the baseline MS4A4E protein measurement. In some embodiments, the MS4A4E protein measurement is decreased by no more than about 2.5%, no more than about 5%, or no more than about 7.5%, relative to the baseline MS4A4E protein measurement. In some embodiments, the MS4A4E protein measurement is decreased by no more than about 10%, relative to the baseline MS4A4E protein measurement. In some embodiments, the MS4A4E protein measurement is decreased by no more than about 20%, no more than about 30%, no more than about 40%, no more than about 50%, no more than about 60%, no more than about 70%, no more than about 80%, no more than about 90%, or no more than about 100%, relative to the baseline MS4A4E protein measurement. In some embodiments, the MS4A4E protein measurement is decreased by 2.5%, 5%, 7.5%, 19%, 20%, 30%, 40%, 50%, 60%, 70%, 80%, 90%, or 100%, or by a range defined by any of the two aforementioned percentages.

[0283] In some embodiments, the measurement is an MS4A4E mRNA measurement. In some embodiments, the MS4A4E mRNA measurement comprises an MS4A4E mRNA level. In some embodiments, the MS4A4E mRNA level is indicated as an amount or percentage of MS4A4E mRNA per sample weight. In some embodiments, the MS4A4E mRNA level is indicated as an amount or percentage of MS4A4E mRNA per sample volume. In some embodiments, the MS4A4E mRNA level is indicated as an amount or percentage of MS4A4E mRNA per total mRNA within the sample. In some embodiments, the MS4A4E mRNA level is indicated as an amount or percentage of MS4A4E mRNA per total nucleic acids within the sample. In some embodiments, the MS4A4E mRNA level is indicated relative to another mRNA level, such as an mRNA level of a housekeeping gene, within the sample. In some embodiments, the MS4A4E mRNA measurement is obtained by an assay such as a PCR assay. In some embodiments, the PCR comprises qPCR. In some embodiments, the PCR comprises reverse transcription of the MS4A4E mRNA.

[0284] In some embodiments, the composition reduces the MS4A4E mRNA measurement relative to the baseline MS4A4E mRNA measurement. In some embodiments, the MS4A4E mRNA measurement is obtained in a second sample obtained from the subject after administering the composition to the subject. In some embodiments, the composition reduces MS4A4E mRNA levels relative to the baseline MS4A4E mRNA levels. In some embodiments, the reduced MS4A4E mRNA levels are measured in a second sample obtained from the subject after administering the composition to the subject. In some embodiments, the second sample is a liver sample. In some embodiments, the second sample is an adipose sample.

[0285] In some embodiments, the MS4A4E mRNA measurement is reduced by about 2.5% or more, about 5% or more, or about 7.5% or more, relative to the baseline MS4A4E mRNA measurement. In some embodiments, the MS4A4E mRNA measurement is decreased by about 10% or more, relative to the baseline MS4A4E mRNA measurement. In some embodiments, the MS4A4E mRNA measurement is decreased by about 20% or more, about 30% or more, about 40% or more, about 50% or more, about 60% or more, about 70% or more, about 80% or more, about 90% or more, or about 100%, relative to the baseline MS4A4E mRNA measurement. In some embodiments, the MS4A4E mRNA measurement is decreased by no more than about 2.5%, no more than about 5%, or no more than about 7.5%, relative to the baseline MS4A4E mRNA measurement. In some embodiments, the MS4A4E mRNA measurement is decreased by no more than about 10%, relative to the baseline MS4A4E mRNA measurement. In some embodiments, the MS4A4E mRNA measurement is decreased by no more than about 20%, no more than about 30%, no more than about 40%, no more than about 50%, no more than about 60%, no more than about 70%, no more than about 80%, no more than about 90%, or no more than about 100%, relative to the baseline MS4A4E mRNA measurement. In some embodiments, the MS4A4E mRNA measurement is decreased by 2.5%, 5%, 7.5%, 10%, 20%, 30%, 40%, 50%, 60%, 70%, 80%, 90%, or 100% or by a range defined by any of the two aforementioned percentages.

### III. DEFINITIONS

[0286] Unless defined otherwise, all terms of art, notations and other technical and scientific terms or terminology used herein are intended to have the same meaning as is commonly understood by one of ordinary skill in the art to which the claimed subject matter pertains. In some cases, terms with commonly understood meanings are defined herein for clarity and/or for ready reference, and the inclusion of such definitions herein should not necessarily be construed to represent a substantial difference over what is generally understood in the art.

[0287] Throughout this application, various embodiments may be presented in a range format. It should be understood that the description in range format is merely for convenience and brevity and should not be construed as an inflexible limitation on the scope of the disclosure. Accordingly, the description of a range should be considered to have specifically disclosed all the possible subranges as well as individual numerical values within that range. For example, description of a range such as from 1 to 6 should be considered to have specifically disclosed subranges such as from 1 to 3, from 1 to 4, from 1 to 5, from 2 to 4, from 2 to 6, from 3 to 6 etc., as well as individual numbers within that range, for example, 1, 2, 3, 4, 5, and 6. This applies regardless of the breadth of the range.

[0288] As used in the specification and claims, the singular forms “a”, “an” and “the” include plural references unless the context clearly dictates otherwise. For example, the term “a sample” includes a plurality of samples, including mixtures thereof.

[0289] The terms “determining,” “measuring,” “evaluating,” “assessing,” “assaying,” and “analyzing” are often used interchangeably herein to refer to forms of measurement. The terms include determining if an element is present or not (for example, detection). These terms can include quantitative, qualitative or quantitative and qualitative determinations. Assessing can be relative or absolute. “Detecting the presence of” can include determining the amount of something present in addition to determining whether it is present or absent depending on the context.

[0290] The terms “subject,” and “patient” may be used interchangeably herein. A “subject” can be a biological entity containing expressed genetic materials. The biological entity can be a plant, animal, or microorganism, including, for example, bacteria, viruses, fungi, and protozoa. The subject can be a mammal. The mammal can be a human. The subject may be diagnosed or suspected of being at high risk for a disease. In some cases, the subject is not necessarily diagnosed or suspected of being at high risk for the disease.

[0291] As used herein, the term “about” a number refers to that number plus or minus 10% of that number. The term “about” a range refers to that range minus 10% of its lowest value and plus 10% of its greatest value.

[0292] As used herein, the terms “treatment” or “treating” are used in reference to a pharmaceutical or other intervention regimen for obtaining beneficial or desired results in the recipient. Beneficial or desired results include but are not limited to a therapeutic benefit and/or a prophylactic benefit. A therapeutic benefit may refer to eradication or amelioration of symptoms or of an underlying disorder being treated. Also, a therapeutic benefit can be achieved with the eradication or amelioration of one or more of the physiological symptoms associated with the underlying disorder such that an improvement is observed in the subject, notwithstanding that the subject may still be afflicted with the underlying disorder. A prophylactic effect includes delaying, preventing, or eliminating the appearance of a disease or condition, delaying or eliminating the onset of symptoms of a disease or condition, slowing, halting, or reversing the progression of a disease or condition, or any combination thereof. For prophylactic benefit, a subject at risk of developing a particular disease, or to a subject reporting one or more of the physiological symptoms of a disease may undergo treatment, even though a diagnosis of this disease may not have been made.

[0293] The term “Cx-y” or “Cx-Cy” when used in conjunction with a chemical moiety, such as alkyl, alkenyl, or alkynyl is meant to include groups that contain from x to y carbons in the chain. For example, the term “C1-6alkyl” refers to substituted or unsubstituted saturated hydrocarbon groups, including straight-chain alkyl and branched-chain alkyl groups that contain from 1 to 6 carbons.

[0294] The terms “Cx-yalkenyl” and “Cx-yalkynyl” refer to substituted or unsubstituted unsaturated aliphatic groups analogous in length and possible substitution to the alkyls described above, but that contain at least one double or triple bond, respectively.

[0295] The term “carbocycle” as used herein refers to a saturated, unsaturated or aromatic ring in which each atom of the ring is carbon. Carbocycle includes 3- to 10-membered monocyclic rings, 5- to 12-membered bicyclic rings, 5- to 12-membered spiro bicycles, and 5- to 12-membered bridged rings. Each ring of a bicyclic carbocycle may be selected from saturated, unsaturated, and aromatic rings. In an exemplary embodiment, an aromatic ring, e.g., phenyl, may be fused to a saturated or unsaturated ring, e.g., cyclohexane, cyclopentane, or cyclohexene. A bicyclic carbocycle includes any combination of saturated, unsaturated and aromatic bicyclic rings, as valence permits. A bicyclic carbocycle further includes spiro bicyclic rings such as spiropentane. A bicyclic carbocycle includes any combination of ring sizes such as 3-3 spiro ring systems, 4-4 spiro ring systems, 4-5 fused ring systems, 5-5 fused ring systems, 5-6 fused ring systems, 6-6 fused ring systems, 5-7 fused ring systems, 6-7 fused ring systems, 5-8 fused ring systems, and 6-8 fused ring systems. Exemplary carbocycles include cyclopentyl, cyclohexyl, cyclohexenyl, adamantyl, phenyl, indanyl, naphthyl, and bicyclo[1.1.1]pentanyl.

[0296] The term “aryl” refers to an aromatic monocyclic or aromatic multicyclic hydrocarbon ring system. The aromatic monocyclic or aromatic multicyclic hydrocarbon ring system contains only hydrogen and carbon and from five to eighteen carbon atoms, where at least one of the rings in the ring system is aromatic, i.e., it contains a cyclic, delocalized (4n+2) π-electron system in accordance with the Hückel theory. The ring system from which aryl groups are derived include, but are not limited to, groups such as benzene, fluorene, indane, indene, tetralin and naphthalene.

[0297] The term “cycloalkyl” refers to a saturated ring in which each atom of the ring is carbon. Cycloalkyl may include monocyclic and polycyclic rings such as 3- to 10-membered monocyclic rings, 5- to 12-membered bicyclic rings, 5- to 12-membered spiro bicycles, and 5- to 12-membered bridged rings. In certain embodiments, a cycloalkyl comprises three to ten carbon atoms. In other embodiments, a cycloalkyl comprises five to seven carbon atoms. The cycloalkyl may be attached to the rest of the molecule by a single bond. Examples of monocyclic cycloalkyls include, e.g., cyclopropyl, cyclobutyl, cyclopentyl, cyclohexyl, cycloheptyl, and cyclooctyl. Polycyclic cycloalkyl radicals include, for example, adamantyl, spiropentane, norbornyl (i.e., bicyclo[2.2.1]heptanyl), decalinyl, 7,7 dimethyl bicyclo[2.2.1]heptanyl, bicyclo[1.1.1]pentanyl, and the like.

[0298] The term “cycloalkenyl” refers to a saturated ring in which each atom of the ring is carbon and there is at least one double bond between two ring carbons. Cycloalkenyl may include monocyclic and polycyclic rings such as 3- to 10-membered monocyclic rings, 6- to 12-membered bicyclic rings, and 5- to 12-membered bridged rings. In other embodiments, a cycloalkenyl comprises five to seven carbon atoms. The cycloalkenyl may be attached to the rest of the molecule by a single bond. Examples of monocyclic cycloalkenyls include, e.g., cyclopentenyl, cyclohexenyl, cycloheptenyl, and cyclooctenyl.

[0299] The term “halo” or, alternatively, “halogen” or “halide,” means fluoro, chloro, bromo or iodo. In some embodiments, halo is fluoro, chloro, or bromo.

[0300] The term “haloalkyl” refers to an alkyl radical, as defined above, that is substituted by one or more halo radicals, for example, trifluoromethyl, dichloromethyl, bromomethyl, 2,2,2 trifluoroethyl, 1 chloromethyl 2 fluoroethyl, and the like. In some embodiments, the alkyl part of the haloalkyl radical is optionally further substituted as described herein.

[0301] The term “heterocycle” as used herein refers to a saturated, unsaturated or aromatic ring comprising one or more heteroatoms. Exemplary heteroatoms include N, O, Si, P, B, and S atoms. Heterocycles include 3- to 10-membered monocyclic rings, 6- to 12-membered bicyclic rings, 5- to 12-membered spiro bicycles, and 5- to 12-membered bridged rings. A bicyclic heterocycle includes any combination of saturated, unsaturated and aromatic bicyclic rings, as valence permits. In an exemplary embodiment, an aromatic ring, e.g., pyridyl, may be fused to a saturated or unsaturated ring, e.g., cyclohexane, cyclopentane, morpholine, piperidine or cyclohexene. A bicyclic heterocycle includes any combination of ring sizes such as 4-5 fused ring systems, 5-5 fused ring systems, 5-6 fused ring systems, 6-6 fused ring systems, 5-7 fused ring systems, 6-7 fused ring systems, 5-8 fused ring systems, and 6-8 fused ring systems. A bicyclic heterocycle further includes spiro bicyclic rings, e.g., 5 to 12-membered spiro bicycles, such as 2-oxa-6-azaspiro[3.3]heptane.

[0302] The term “heteroaryl” refers to a radical derived from a 5 to 18 membered aromatic ring radical that comprises two to seventeen carbon atoms and from one to six heteroatoms selected from nitrogen, oxygen and sulfur. As used herein, the heteroaryl radical is a monocyclic, bicyclic, tricyclic or tetracyclic ring system, wherein at least one of the rings in the ring system is aromatic, i.e., it contains a cyclic, delocalized (4n+2) π-electron system in accordance with the Hückel theory. Heteroaryl includes fused or bridged ring systems. The heteroatom(s) in the heteroaryl radical is optionally oxidized. One or more nitrogen atoms, if present, are optionally quaternized. The heteroaryl is attached to the rest of the molecule through any atom of the ring(s). Examples of heteroaryls include, but are not limited to, azepinyl, acridinyl, benzimidazolyl, benzindolyl, 1,3 benzodioxolyl, benzofuranyl, benzoxazolyl, benzo[d]thiazolyl, benzothiadiazolyl, benzo[b][1,4]dioxepinyl, benzo[b][1,4]oxazinyl, 1,4 benzodioxanyl, benzonaphthofuranyl, benzoxazolyl, benzodioxolyl, benzodioxinyl, benzopyranyl, benzopyranonyl, benzofuranyl, benzofuranonyl, benzothienyl (benzothiophenyl), benzothieno[3,2 d]pyrimidinyl, benzotriazolyl, benzo[4,6]imidazo[1,2 a]pyridinyl, carbazolyl, cinnolinyl, cyclopenta[d]pyrimidinyl, 6,7 dihydro 5H cyclopenta[4,5]thieno[2,3 d]pyrimidinyl, 5,6 dihydrobenzo[h]quinazolinyl, 5,6 dihydrobenzo[h]cinnolinyl, 6,7-dihydro-5H-benzo[6,7]cyclohepta[1,2-c]pyridazinyl, dibenzofuranyl, dibenzothiophenyl, furanyl, furanonyl, furo[3,2 c]pyridinyl, 5,6,7,8,9,10 hexahydrocycloocta[d]pyrimidinyl, 5,6,7,8,9,10 hexahydrocycloocta[d]pyridazinyl, 5,6,7,8,9,10 hexahydrocycloocta[d]pyridinyl, isothiazolyl, imidazolyl, indazolyl, indolyl, indazolyl, isoindolyl, indolinyl, isoindolinyl, isoquinolyl, indolizinyl, isoxazolyl, 5,8 methano 5,6,7,8 tetrahydroquinazolinyl, naphthyridinyl, 1,6 naphthyridinonyl, oxadiazolyl, 2 oxoazepinyl, oxazolyl, oxiranyl, 5,6,6a,7,8,9,10,10a octahydrobenzo[h]quinazolinyl, 1 phenyl 1H pyrrolyl, phenazinyl, phenothiazinyl, phenoxazinyl, phthalazinyl, pteridinyl, purinyl, pyrrolyl, pyrazolyl, pyrazolo[3,4 d]pyrimidinyl, pyridinyl, pyrido[3,2 d]pyrimidinyl, pyrido[3,4 d]pyrimidinyl, pyrazinyl, pyrimidinyl, pyridazinyl, pyrrolyl, quinazolinyl, quinoxalinyl, quinolinyl, isoquinolinyl, tetrahydroquinolinyl, 5,6,7,8 tetrahydroquinazolinyl, 5,6,7,8 tetrahydrobenzo[4,5]thieno[2,3 d]pyrimidinyl, 6,7,8,9 tetrahydro 5H cyclohepta[4,5]thieno[2,3 d]pyrimidinyl, 5,6,7,8 tetrahydropyrido[4,5 c]pyridazinyl, thiazolyl, thiadiazolyl, triazolyl, tetrazolyl, triazinyl, thieno[2,3 d]pyrimidinyl, thieno[3,2 d]pyrimidinyl, thieno[2,3 c]pyridinyl, and thiophenyl (i.e. thienyl).

[0303] The term “heterocycloalkyl” refers to a saturated ring with carbon atoms and at least one heteroatom. Exemplary heteroatoms include N, O, Si, P, B, and S atoms. Heterocycloalkyl may include monocyclic and polycyclic rings such as 3- to 10-membered monocyclic rings, 6- to 12-membered bicyclic rings, 5- to 12-membered spiro bicycles, and 5- to 12-membered bridged rings. The heteroatoms in the heterocycloalkyl radical are optionally oxidized. One or more nitrogen atoms, if present, are optionally quaternized. The heterocycloalkyl is attached to the rest of the molecule through any atom of the heterocycloalkyl, valence permitting, such as any carbon or nitrogen atoms of the heterocycloalkyl. Examples of heterocycloalkyl radicals include, but are not limited to, dioxolanyl, thienyl[1,3]dithianyl, decahydroisoquinolyl, imidazolinyl, imidazolidinyl, isothiazolidinyl, isoxazolidinyl, morpholinyl, octahydroindolyl, octahydroisoindolyl, 2 oxopiperazinyl, 2 oxopiperidinyl, 2 oxopyrrolidinyl, oxazolidinyl, piperidinyl, piperazinyl, 4 piperidonyl, pyrrolidinyl, pyrazolidinyl, quinuclidinyl, thiazolidinyl, tetrahydrofuryl, trithianyl, tetrahydropyranyl, thiomorpholinyl, thiamorpholinyl, 1 oxo thiomorpholinyl, 2-oxa-6-azaspiro[3.3]heptane, and 1,1 dioxo thiomorpholinyl.

[0304] The term “heterocycloalkenyl” refers to an unsaturated ring with carbon atoms and at least one heteroatom and there is at least one double bond between two ring carbons. Heterocycloalkenyl does not include heteroaryl rings. Exemplary heteroatoms include N, O, Si, P, B, and S atoms. Heterocycloalkenyl may include monocyclic and polycyclic rings such as 3- to 10-membered monocyclic rings, 6- to 12-membered bicyclic rings, and 5- to 12-membered bridged rings. In other embodiments, a heterocycloalkenyl comprises five to seven ring atoms. The heterocycloalkenyl may be attached to the rest of the molecule by a single bond. Examples of monocyclic cycloalkenyls include, e.g., pyrroline (dihydropyrrole), pyrazoline (dihydropyrazole), imidazoline (dihydroimidazole), triazoline (dihydrotriazole), dihydrofuran, dihydrothiophene, oxazoline (dihydrooxazole), isoxazoline (dihydroisoxazole), thiazoline (dihydrothiazole), isothiazoline (dihydroisothiazole), oxadiazoline (dihydrooxadiazole), thiadiazoline (dihydrothiadiazole), dihydropyridine, tetrahydropyridine, dihydropyridazine, tetrahydropyridazine, dihydropyrimidine, tetrahydropyrimidine, dihydropyrazine, tetrahydropyrazine, pyran, dihydropyran, thiopyran, dihydrothiopyran, dioxine, dihydrodioxine, oxazine, dihydrooxazine, thiazine, and dihydrothiazine.

[0305] The term “substituted” refers to moieties having substituents replacing a hydrogen on one or more carbons or substitutable heteroatoms, e.g., an NH or NH2 of a compound. It will be understood that “substitution” or “substituted with” includes the implicit proviso that such substitution is in accordance with permitted valence of the substituted atom and the substituent, and that the substitution results in a stable compound, i.e., a compound which does not spontaneously undergo transformation such as by rearrangement, cyclization, elimination, etc. In certain embodiments, substituted refers to moieties having substituents replacing two hydrogen atoms on the same carbon atom, such as substituting the two hydrogen atoms on a single carbon with an oxo, imino or thioxo group. As used herein, the term “substituted” is contemplated to include all permissible substituents of organic compounds. In a broad aspect, the permissible substituents include acyclic and cyclic, branched and unbranched, carbocyclic and heterocyclic, aromatic and non-aromatic substituents of organic compounds. The permissible substituents can be one or more and the same or different for appropriate organic compounds.

[0306] In some embodiments, substituents may include any substituents described herein, for example: halogen, hydroxy, oxo (═O), thioxo (=S), cyano (—CN), nitro (—NO2), imino (=N—H), oximo (=N—OH), hydrazino (=N—NH2), —Rb ORa, —Rb OC(O) Ra, —Rb OC(O) ORa, —Rb OC(O) N(Ra)₂, —Rb N(Ra)₂, —Rb C(O)Ra, —Rb C(O)ORa, —Rb C(O)N(Ra)₂, —Rb O Rc C(O)N(Ra)₂, —Rb N(Ra)C(O)ORa, —Rb N(Ra)C(O)Ra, —Rb N(Ra)S(O)tRa (where t is 1 or 2), —Rb S(O)tRa (where t is 1 or 2), —Rb S(O)tORa (where t is 1 or 2), and —Rb S(O)tN(Ra)₂ (where t is 1 or 2); and alkyl, alkenyl, alkynyl, aryl, aralkyl, aralkenyl, aralkynyl, cycloalkyl, cycloalkylalkyl, heterocycloalkyl, heterocycloalkylalkyl, heteroaryl, and heteroarylalkyl, any of which may be optionally substituted by alkyl, alkenyl, alkynyl, halogen, haloalkyl, haloalkenyl, haloalkynyl, oxo (═O), thioxo (=S), cyano (—CN), nitro (—NO2), imino (=N—H), oximo (=N—OH), hydrazine (=N—NH2), —Rb ORa, —Rb OC(O) Ra, —Rb OC(O) ORa, —Rb OC(O) N(Ra)₂, —Rb N(Ra)₂, —Rb C(O)Ra, —Rb C(O)ORa, —Rb C(O)N(Ra)₂, —Rb O Rc C(O)N(Ra)₂, —Rb N(Ra)C(O)ORa, —Rb N(Ra)C(O)Ra, —Rb N(Ra)S(O)tRa (where t is 1 or 2), —Rb S(O)tRa (where t is 1 or 2), —Rb S(O)tORa (where t is 1 or 2) and —Rb S(O)tN(Ra)₂ (where t is 1 or 2); wherein each Ra is independently selected from hydrogen, alkyl, cycloalkyl, cycloalkylalkyl, aryl, aralkyl, heterocycloalkyl, heterocycloalkylalkyl, heteroaryl, or heteroarylalkyl, wherein each Ra, valence permitting, may be optionally substituted with alkyl, alkenyl, alkynyl, halogen, haloalkyl, haloalkenyl, haloalkynyl, oxo (═O), thioxo (=S), cyano (—CN), nitro (—NO2), imino (=N—H), oximo (=N—OH), hydrazine (=N—NH2), —Rb ORa, —Rb OC(O) Ra, —Rb OC(O) ORa, —Rb OC(O) N(Ra)₂, —Rb N(Ra)₂, —Rb C(O)Ra, —Rb C(O)ORa, —Rb C(O)N(Ra)₂, —Rb O Rc C(O)N(Ra)₂, —Rb N(Ra)C(O)ORa, —Rb N(Ra)C(O)Ra, —Rb N(Ra)S(O)tRa (where t is 1 or 2), —Rb S(O)tRa (where t is 1 or 2), —Rb S(O)tORa (where t is 1 or 2) and —Rb S(O)tN(Ra)₂ (where t is 1 or 2); and wherein each Rb is independently selected from a direct bond or a straight or branched alkylene, alkenylene, or alkynylene chain, and each Rc is a straight or branched alkylene, alkenylene or alkynylene chain.

[0307] Double bonds to oxygen atoms, such as oxo groups, are represented herein as both “═O” and “(O)”. Double bonds to nitrogen atoms are represented as both “=NR” and “(NR)”. Double bonds to sulfur atoms are represented as both “=S” and “(S)”.

[0308] In some embodiments, a “derivative” polypeptide or peptide is one that is modified, for example, by glycosylation, pegylation, phosphorylation, sulfation, reduction/alkylation, acylation, chemical coupling, or mild formalin treatment. A derivative may also be modified to contain a detectable label, either directly or indirectly, including, but not limited to, a radioisotope, fluorescent, and enzyme label.

[0309] Some embodiments refer to nucleic acid sequence information. In some embodiments, any uracil (U) may be interchanged with any thymine (T), and vice versa. For example, in an siRNA with a nucleic acid sequence comprising one or more Us, in some embodiments any of the Us may be replaced with Ts. Similarly, in an siRNA with a nucleic acid sequence comprising one or more Ts, in some embodiments any of the Ts may be replaced with Us. In some embodiments, an oligonucleotide such as an siRNA disclosed herein comprises or consists of RNA. In some embodiments, the oligonucleotide may comprise or consist of DNA.

[0310] The section headings used herein are for organizational purposes only and are not to be construed as limiting the subject matter described.

### VI. EXAMPLES

### Example 1: Predicted Loss of Function Variants in MS4A4E Demonstrate Protective Associations for Non-Alcoholic Fatty Liver Disease and Related Traits

[0311] MS4A4E variants were evaluated for associations with non-alcoholic fatty liver disease (NAFLD) and a variety of related liver and metabolic disease traits in approximately 382,000 individuals with genotype data from the UK Biobank cohort. Variants evaluated included rs554361372, a rare (MAF=0.001) MS4A4E stop-gained variant (Gly151Ter; G151Ter) which prematurely terminates the MS4A4E protein at amino acid 151, and rs545431642, a rare (MAF=0.0007) MS4A4E stop-gained variant (Arg223Ter; R²²³Ter), which prematurely terminates the MS4A4E protein at amino acid 223. The applicants hypothesize that both stop-gained variants are loss-of-function variants that result in a decrease in the abundance or activity of the MS4A4E gene product. Applicants also evaluated a MS4A4E gene burden test which aggregated rs554361372, rs545431642 and several additional rare annotated loss-of-function variants in MS4A4E.

[0312] Analyses used a logistic or linear regression model with age, sex and the first ten principal components of genetic ancestry as covariates. The analyses resulted in identification of associations for the individual MS4A4E loss-of-function variants and the MS4A4E loss-of-function gene burden (Tables 5A-5C). For example, there were protective associations with multiple liver-disease-related traits. The rs554361372 (G151Ter) variant, the rs545431642 (R223Ter) variant and the MS4A4E loss-of-function gene burden were all associated with protection from all-cause diseases of liver and with protection from NAFLD. Additionally, MS4A4E loss-of-function variants were individually and collectively associated with decreased alanine aminotransferase (ALT), decreased blood triglycerides, increased blood HDL cholesterol, decreased hemoglobin A1C and decreased body mass index (BMI).

TABLE 5A
MS4A4E genetic variant associations with NAFLD and cardiometabolic traits

| | | | | | | Non Alcoholic | |
|---|---|---|---|---|---|---|---|
| | | | | Diseases of liver | | Fatty Liver | |
| | | | | (n = 24,324) | | Disease (n = 5,766) | |
| Variant | Gene | Function | MAF | P value | OR | P value | OR |
| rs545431642 | MS4A4E | Stop Gained | 0.0007 | 0.039 | ↓0.718 | 0.035 | ↓0.466 |
| rs554361372 | MS4A4E | Stop Gained | 0.001 | 6.29E−05 | ↓0.626 | 0.004 | ↓0.500 |
| Burden | MS4A4E | LoF Gene Burden | 0.002 | 1.22E−06 | ↓0.646 | 2.10E−05 | ↓0.456 |

TABLE 5B
MS4A4E genetic variants associations
with NAFLD and cardiometabolic traits

| | Alanine | | High Density | | | |
|---|---|---|---|---|---|---|
| | Aminotransferase | | Lipoprotein | | Triglycerides | |
| | (n = 362,710) | | (n = 332,964) | | (n = 362,967) | |
| | P | | P | | P | |
| Variant | value | Beta | value | Beta | value | Beta |
| rs545431642 | 0.455 | ↑0.006 | 0.072 | ↑0.008 | 0.101 | ↓−0.016 |
| rs554361372 | 0.009 | ↓−0.015 | 0.009 | ↑0.009 | 0.026 | ↓−0.015 |
| Burden | 0.035 | ↓−0.009 | 0.002 | ↑0.008 | 0.004 | ↓−0.015 |

TABLE 5C
MS4A4E genetic variants associations
with NAFLD and cardiometabolic traits

| | |
|---|---|
| Hemoglobin A1C | Body mass index |
| (n = 346,192) | (n = 376,610) |

| Variant | P value | Beta | P value | Beta |
|---|---|---|---|---|
| rs545431642 | 0.312 | ↓−0.002 | 0.011 | ↓−0.110 |
| rs554361372 | 0.028 | ↓−0.003 | 0.033 | ↓−0.065 |
| Burden | 0.026 | ↓−0.003 | 0.003 | ↓−0.070 |

[0313] These results indicate that loss-of-function of MS4A4E resulted in protection from liver disease and NAFLD, lower ALT, lower blood triglycerides, higher blood HDL cholesterol, lower hemoglobin A1C and lower BMI; and indicate that therapeutic inhibition of MS4A4E may result in similar effects.

### Example 2: Bioinformatic Selection of Sequences in Order to Identify Therapeutic siRNAs to Downmodulate Expression of the MS4A4E mRNA

[0314] Screening sets were defined based on bioinformatic analysis. Therapeutic siRNAs were designed to target human MS4A4E. Predicted specificity in human was determined for sense (S) and antisense (AS) strands. These were assigned a “specificity score” which considers the likelihood of unintended downregulation of any other transcript by full or partial complementarity of an siRNA strand (up to 2 mismatches within positions 2-18) as well as the number and positions of mismatches. Thus, off-target(s) transcripts for antisense and sense strands of each siRNA were identified. As identified, siRNAs with high specificity and a low number of predicted off-targets provided a benefit of increased targeting specificity.

[0315] In addition to selecting siRNA sequences with high sequence specificity to MS4A4E mRNA, siRNA sequences within the seed region were analyzed for similarity to seed regions of known miRNAs. siRNAs can function in a miRNA like manner via base-pairing with complementary sequences within the 3′-UTR of mRNA molecules. The complementarity typically encompasses the 5′-bases at positions 2-7 of the miRNA (seed region). To circumvent siRNAs to act via functional miRNA binding sites, siRNA strands containing natural miRNA seed regions can be avoided. Seed regions identified in miRNAs from human, mouse, rat, rhesus monkey, dog, rabbit, and pig are referred to as “conserved”. Combining the “specificity score” with miRNA seed analysis yielded a “specificity category”. This is divided into categories 1-4, with 1 having the highest specificity and 4 having the lowest specificity. Each strand of the siRNA is assigned to a specificity category.

[0316] Analysis of the Genome Aggregation Database (gnomAD) to identify siRNAs targeting regions with known SNPs was also carried out to identify siRNAs that may be non-functional in individuals containing the SNP. Information regarding the positions of SNPs within the target sequence as well as minor allele frequency (MAF) in case data was obtained in this analysis.

[0317] Initial analysis of the relevant MS4A4E mRNA sequence revealed few sequences that fulfil the specificity parameters and at the same time target MS4A4E mRNA in all the analyzed relevant species. Therefore, independent screening subsets were designed for the therapeutic siRNAs.

[0318] The siRNAs in these subsets recognized at least the human MS4A4E sequences. Therefore, the siRNAs in these subsets can be used to target human MS4A4E in a therapeutic setting.

[0319] The number of siRNA sequences derived from human MS4A4E mRNA (ENST00000651255.1, SEQ ID NO: 5117) without consideration of specificity or species cross-reactivity was 2447 (sense and antisense strand sequences included in SEQ ID NOS: 1-2447 and 2448-4894, respectively).

[0320] Prioritizing sequences for target specificity, miRNA seed region sequences and SNPs as described above yielded subset A. Subset A contains 147 siRNAs whose base sequences are shown in Table 6.

TABLE 6
Subset A

| | Sense strand | | Antisense strand |
|---|---|---|---|
| SEQ ID NO: | sequence (5′-3′) | SEQ ID NO: | sequence (5′-3′) |
| 4 | AGUUCUCAACACAUCCUUU | 2451 | AAAGGAUGUGUUGAGAACU |
| 5 | GUUCUCAACACAUCCUUUA | 2452 | UAAAGGAUGUGUUGAGAAC |
| 27 | UUCCAAACAUCUACUAGAA | 2474 | UUCUAGUAGAUGUUUGGAA |
| 28 | UCCAAACAUCUACUAGAAA | 2475 | UUUCUAGUAGAUGUUUGGA |
| 37 | CUACUAGAAAAGGAGUGCA | 2484 | UGCACUCCUUUUCUAGUAG |
| 43 | GAAAAGGAGUGCAGAUUUA | 2490 | UAAAUCUGCACUCCUUUUC |
| 80 | GUGGGGGAAGCUGACUGUG | 2527 | CACAGUCAGCUUCCCCCAC |
| 86 | GAAGCUGACUGUGUCUGGA | 2533 | UCCAGACACAGUCAGCUUC |
| 129 | CAGAGCCCUGCACUCAUCA | 2576 | UGAUGAGUGCAGGGCUCUG |
| 132 | AGCCCUGCACUCAUCAGAC | 2579 | GUCUGAUGAGUGCAGGGCU |
| 134 | CCCUGCACUCAUCAGACCU | 2581 | AGGUCUGAUGAGUGCAGGG |
| 209 | CAAGGAAUGGAACAGACCA | 2656 | UGGUCUGUUCCAUUCCUUG |
| 235 | GGCUGGCCCUGAUGUGCCC | 2682 | GGGCACAUCAGGGCCAGCC |
| 257 | CUGGGAAACAUAGAUGUCA | 2704 | UGACAUCUAUGUUUCCCAG |
| 261 | GAAACAUAGAUGUCAUACA | 2708 | UGUAUGACAUCUAUGUUUC |
| 266 | AUAGAUGUCAUACAUUCAU | 2713 | AUGAAUGUAUGACAUCUAU |
| 271 | UGUCAUACAUUCAUAUCUG | 2718 | CAGAUAUGAAUGUAUGACA |
| 283 | AUAUCUGUGUAAAGGAUUG | 2730 | CAAUCCUUUACACAGAUAU |
| 290 | UGUAAAGGAUUGCAAGAGA | 2737 | UCUCUUGCAAUCCUUUACA |
| 312 | UCUUCAAGAGGAAACCCAA | 2759 | UUGGGUUUCCUCUUGAAGA |
| 357 | AGUUUUCAACUCAUUCGGU | 2804 | ACCGAAUGAGUUGAAAACU |
| 358 | GUUUUCAACUCAUUCGGUA | 2805 | UACCGAAUGAGUUGAAAAC |
| 360 | UUUCAACUCAUUCGGUAUC | 2807 | GAUACCGAAUGAGUUGAAA |
| 361 | UUCAACUCAUUCGGUAUCC | 2808 | GGAUACCGAAUGAGUUGAA |
| 363 | CAACUCAUUCGGUAUCCUU | 2810 | AAGGAUACCGAAUGAGUUG |
| 364 | AACUCAUUCGGUAUCCUUA | 2811 | UAAGGAUACCGAAUGAGUU |
| 365 | ACUCAUUCGGUAUCCUUAU | 2812 | AUAAGGAUACCGAAUGAGU |
| 367 | UCAUUCGGUAUCCUUAUCA | 2814 | UGAUAAGGAUACCGAAUGA |
| 368 | CAUUCGGUAUCCUUAUCAG | 2815 | CUGAUAAGGAUACCGAAUG |
| 371 | UCGGUAUCCUUAUCAGUUG | 2818 | CAACUGAUAAGGAUACCGA |
| 374 | GUAUCCUUAUCAGUUGCAG | 2821 | CUGCAACUGAUAAGGAUAC |
| 381 | UAUCAGUUGCAGCAGGAAU | 2828 | AUUCCUGCUGCAACUGAUA |
| 384 | CAGUUGCAGCAGGAAUUAG | 2831 | CUAAUUCCUGCUGCAACUG |
| 385 | AGUUGCAGCAGGAAUUAGA | 2832 | UCUAAUUCCUGCUGCAACU |
| 391 | AGCAGGAAUUAGAACAACA | 2838 | UGUUGUUCUAAUUCCUGCU |
| 428 | AGUCUAGGAAAGAAUAUCA | 2875 | UGAUAUUCUUUCCUAGACU |
| 434 | GGAAAGAAUAUCACCAGUU | 2881 | AACUGGUGAUAUUCUUUCC |
| 443 | AUCACCAGUUCAGUCUUGG | 2890 | CCAAGACUGAACUGGUGAU |
| 444 | UCACCAGUUCAGUCUUGGC | 2891 | GCCAAGACUGAACUGGUGA |
| 445 | CACCAGUUCAGUCUUGGCU | 2892 | AGCCAAGACUGAACUGGUG |
| 453 | CAGUCUUGGCUAUAUCAGG | 2900 | CCUGAUAUAGCCAAGACUG |
| 461 | GCUAUAUCAGGGAUCUUAA | 2908 | UUAAGAUCCCUGAUAUAGC |
| 469 | AGGGAUCUUAAUCAAUGCA | 2916 | UGCAUUGAUUAAGAUCCCU |
| 476 | UUAAUCAAUGCAAUAAGCU | 2923 | AGCUUAUUGCAUUGAUUAA |
| 478 | AAUCAAUGCAAUAAGCUUG | 2925 | CAAGCUUAUUGCAUUGAUU |
| 479 | AUCAAUGCAAUAAGCUUGA | 2926 | UCAAGCUUAUUGCAUUGAU |
| 480 | UCAAUGCAAUAAGCUUGAC | 2927 | GUCAAGCUUAUUGCAUUGA |
| 482 | AAUGCAAUAAGCUUGACGU | 2929 | ACGUCAAGCUUAUUGCAUU |
| 484 | UGCAAUAAGCUUGACGUUU | 2931 | AAACGUCAAGCUUAUUGCA |
| 486 | CAAUAAGCUUGACGUUUUA | 2933 | UAAAACGUCAAGCUUAUUG |
| 487 | AAUAAGCUUGACGUUUUAU | 2934 | AUAAAACGUCAAGCUUAUU |
| 488 | AUAAGCUUGACGUUUUAUU | 2935 | AAUAAAACGUCAAGCUUAU |
| 496 | GACGUUUUAUUCAUUCCGU | 2943 | ACGGAAUGAAUAAAACGUC |
| 497 | ACGUUUUAUUCAUUCCGUU | 2944 | AACGGAAUGAAUAAAACGU |
| 500 | UUUUAUUCAUUCCGUUACC | 2947 | GGUAACGGAAUGAAUAAAA |
| 501 | UUUAUUCAUUCCGUUACCA | 2948 | UGGUAACGGAAUGAAUAAA |
| 502 | UUAUUCAUUCCGUUACCAU | 2949 | AUGGUAACGGAAUGAAUAA |
| 504 | AUUCAUUCCGUUACCAUUA | 2951 | UAAUGGUAACGGAAUGAAU |
| 507 | CAUUCCGUUACCAUUACUG | 2954 | CAGUAAUGGUAACGGAAUG |
| 510 | UCCGUUACCAUUACUGUAA | 2957 | UUACAGUAAUGGUAACGGA |
| 511 | CCGUUACCAUUACUGUAAC | 2958 | GUUACAGUAAUGGUAACGG |
| 517 | CCAUUACUGUAACCACGAU | 2964 | AUCGUGGUUACAGUAAUGG |
| 518 | CAUUACUGUAACCACGAUC | 2965 | GAUCGUGGUUACAGUAAUG |
| 519 | AUUACUGUAACCACGAUCA | 2966 | UGAUCGUGGUUACAGUAAU |
| 520 | UUACUGUAACCACGAUCAG | 2967 | CUGAUCGUGGUUACAGUAA |
| 522 | ACUGUAACCACGAUCAGUU | 2969 | AACUGAUCGUGGUUACAGU |
| 523 | CUGUAACCACGAUCAGUUG | 2970 | CAACUGAUCGUGGUUACAG |
| 524 | UGUAACCACGAUCAGUUGU | 2971 | ACAACUGAUCGUGGUUACA |
| 525 | GUAACCACGAUCAGUUGUC | 2972 | GACAACUGAUCGUGGUUAC |
| 526 | UAACCACGAUCAGUUGUCA | 2973 | UGACAACUGAUCGUGGUUA |
| 527 | AACCACGAUCAGUUGUCAA | 2974 | UUGACAACUGAUCGUGGUU |
| 528 | ACCACGAUCAGUUGUCAAG | 2975 | CUUGACAACUGAUCGUGGU |
| 530 | CACGAUCAGUUGUCAAGUA | 2977 | UACUUGACAACUGAUCGUG |
| 531 | ACGAUCAGUUGUCAAGUAA | 2978 | UUACUUGACAACUGAUCGU |
| 534 | AUCAGUUGUCAAGUAAUUG | 2981 | CAAUUACUUGACAACUGAU |
| 535 | UCAGUUGUCAAGUAAUUGU | 2982 | ACAAUUACUUGACAACUGA |
| 536 | CAGUUGUCAAGUAAUUGUU | 2983 | AACAAUUACUUGACAACUG |
| 540 | UGUCAAGUAAUUGUUACAU | 2987 | AUGUAACAAUUACUUGACA |
| 551 | UGUUACAUGACUAUGUCCA | 2998 | UGGACAUAGUCAUGUAACA |
| 554 | UACAUGACUAUGUCCAUUU | 3001 | AAAUGGACAUAGUCAUGUA |
| 565 | GUCCAUUUUAAUGGGUACG | 3012 | CGUACCCAUUAAAAUGGAC |
| 567 | CCAUUUUAAUGGGUACGGA | 3014 | UCCGUACCCAUUAAAAUGG |
| 568 | CAUUUUAAUGGGUACGGAU | 3015 | AUCCGUACCCAUUAAAAUG |
| 571 | UUUAAUGGGUACGGAUGGC | 3018 | GCCAUCCGUACCCAUUAAA |
| 572 | UUAAUGGGUACGGAUGGCA | 3019 | UGCCAUCCGUACCCAUUAA |
| 573 | UAAUGGGUACGGAUGGCAU | 3020 | AUGCCAUCCGUACCCAUUA |
| 574 | AAUGGGUACGGAUGGCAUG | 3021 | CAUGCCAUCCGUACCCAUU |
| 578 | GGUACGGAUGGCAUGGUGC | 3025 | GCACCAUGCCAUCCGUACC |
| 588 | GCAUGGUGCUCCUCUUAAG | 3035 | CUUAAGAGGAGCACCAUGC |
| 589 | CAUGGUGCUCCUCUUAAGU | 3036 | ACUUAAGAGGAGCACCAUG |
| 655 | AGUGCUUUGUUGUAGCCCC | 3102 | GGGGCUACAACAAAGCACU |
| 656 | GUGCUUUGUUGUAGCCCCA | 3103 | UGGGGCUACAACAAAGCAC |
| 657 | UGCUUUGUUGUAGCCCCAG | 3104 | CUGGGGCUACAACAAAGCA |
| 659 | CUUUGUUGUAGCCCCAGUG | 3106 | CACUGGGGCUACAACAAAG |
| 691 | AAUUAGAAGCAAUACUUUC | 3138 | GAAAGUAUUGCUUCUAAUU |
| 695 | AGAAGCAAUACUUUCAUGU | 3142 | ACAUGAAAGUAUUGCUUCU |
| 696 | GAAGCAAUACUUUCAUGUG | 3143 | CACAUGAAAGUAUUGCUUC |
| 698 | AGCAAUACUUUCAUGUGCU | 3145 | AGCACAUGAAAGUAUUGCU |
| 701 | AAUACUUUCAUGUGCUACC | 3148 | GGUAGCACAUGAAAGUAUU |
| 712 | GUGCUACCUCCUUUCUAUU | 3159 | AAUAGAAAGGAGGUAGCAC |
| 715 | CUACCUCCUUUCUAUUCAG | 3162 | CUGAAUAGAAAGGAGGUAG |
| 718 | CCUCCUUUCUAUUCAGAUG | 3165 | CAUCUGAAUAGAAAGGAGG |
| 732 | AGAUGCAAUAUGAUGGAAA | 3179 | UUUCCAUCAUAUUGCAUCU |
| 741 | AUGAUGGAAAGAGACUAAA | 3188 | UUUAGUCUCUUUCCAUCAU |
| 742 | UGAUGGAAAGAGACUAAAU | 3189 | AUUUAGUCUCUUUCCAUCA |
| 743 | GAUGGAAAGAGACUAAAUG | 3190 | CAUUUAGUCUCUUUCCAUC |
| 774 | GUACUGUAUGGUGCUCCGG | 3221 | CCGGAGCACCAUACAGUAC |
| 775 | UACUGUAUGGUGCUCCGGA | 3222 | UCCGGAGCACCAUACAGUA |
| 776 | ACUGUAUGGUGCUCCGGAG | 3223 | CUCCGGAGCACCAUACAGU |
| 779 | GUAUGGUGCUCCGGAGAUG | 3226 | CAUCUCCGGAGCACCAUAC |
| 780 | UAUGGUGCUCCGGAGAUGG | 3227 | CCAUCUCCGGAGCACCAUA |
| 781 | AUGGUGCUCCGGAGAUGGA | 3228 | UCCAUCUCCGGAGCACCAU |
| 783 | GGUGCUCCGGAGAUGGACA | 3230 | UGUCCAUCUCCGGAGCACC |
| 790 | CGGAGAUGGACAGUAUCUG | 3237 | CAGAUACUGUCCAUCUCCG |
| 801 | AGUAUCUGGAAAAAGUCUA | 3248 | UAGACUUUUUCCAGAUACU |
| 803 | UAUCUGGAAAAAGUCUAUU | 3250 | AAUAGACUUUUUCCAGAUA |
| 807 | UGGAAAAAGUCUAUUAUGA | 3254 | UCAUAAUAGACUUUUUCCA |
| 813 | AAGUCUAUUAUGACAUUCU | 3260 | AGAAUGUCAUAAUAGACUU |
| 814 | AGUCUAUUAUGACAUUCUA | 3261 | UAGAAUGUCAUAAUAGACU |
| 816 | UCUAUUAUGACAUUCUAUC | 3263 | GAUAGAAUGUCAUAAUAGA |
| 818 | UAUUAUGACAUUCUAUCUU | 3265 | AAGAUAGAAUGUCAUAAUA |
| 829 | UCUAUCUUCUUGGUUGAGG | 3276 | CCUCAACCAAGAAGAUAGA |
| 840 | GGUUGAGGAUUGAAAGUAU | 3287 | AUACUUUCAAUCCUCAACC |
| 847 | GAUUGAAAGUAUUUAUCGA | 3294 | UCGAUAAAUACUUUCAAUC |
| 848 | AUUGAAAGUAUUUAUCGAG | 3295 | CUCGAUAAAUACUUUCAAU |
| 850 | UGAAAGUAUUUAUCGAGUG | 3297 | CACUCGAUAAAUACUUUCA |
| 853 | AAGUAUUUAUCGAGUGCUC | 3300 | GAGCACUCGAUAAAUACUU |
| 856 | UAUUUAUCGAGUGCUCAAU | 3303 | AUUGAGCACUCGAUAAAUA |
| 858 | UUUAUCGAGUGCUCAAUGG | 3305 | CCAUUGAGCACUCGAUAAA |
| 1098 | CUGCCAUCCCAUCUAGGAA | 3545 | UUCCUAGAUGGGAUGGCAG |
| 1204 | CGCCUUUGCCCCACCGCCC | 3651 | GGGCGGUGGGGCAAAGGCG |
| 1207 | CUUUGCCCCACCGCCCUGU | 3654 | ACAGGGCGGUGGGGCAAAG |
| 1208 | UUUGCCCCACCGCCCUGUC | 3655 | GACAGGGCGGUGGGGCAAA |
| 1760 | GGUUCAGCCCCCCACCCGG | 4207 | CCGGGUGGGGGGCUGAACC |
| 1761 | GUUCAGCCCCCCACCCGGC | 4208 | GCCGGGUGGGGGGCUGAAC |
| 1914 | CCAUCUGGGAAGUGUACCC | 4361 | GGGUACACUUCCCAGAUGG |
| 1918 | CUGGGAAGUGUACCCAAUA | 4365 | UAUUGGGUACACUUCCCAG |
| 1921 | GGAAGUGUACCCAAUAGCU | 4368 | AGCUAUUGGGUACACUUCC |
| 1922 | GAAGUGUACCCAAUAGCUC | 4369 | GAGCUAUUGGGUACACUUC |
| 1957 | GAGGACAAUGGCGGUUUUG | 4404 | CAAAACCGCCAUUGUCCUC |
| 1958 | AGGACAAUGGCGGUUUUGU | 4405 | ACAAAACCGCCAUUGUCCU |
| 2275 | AGGGACACAAACACCUCGG | 4722 | CCGAGGUGUUUGUGUCCCU |
| 2276 | GGGACACAAACACCUCGGA | 4723 | UCCGAGGUGUUUGUGUCCC |
| 2278 | GACACAAACACCUCGGAAG | 4725 | CUUCCGAGGUGUUUGUGUC |
| 2279 | ACACAAACACCUCGGAAGG | 4726 | CCUUCCGAGGUGUUUGUGU |
| 2281 | ACAAACACCUCGGAAGGCC | 4728 | GGCCUUCCGAGGUGUUUGU |
| 2282 | CAAACACCUCGGAAGGCCG | 4729 | CGGCCUUCCGAGGUGUUUG |

[0321] The siRNAs in subset A had the following characteristics: Cross-reactivity: With 19mer in human MS4A4E mRNA; Specificity category: For human: AS2 or better, SS3 or better; and miRNA seeds: AS+SS strand: seed region not conserved in human, mouse, and rat and not present in >4 species; Off-target frequency: ≤30 human off-targets matched with 2 mismatches in antisense strand; and SNPs: siRNA target sites do not harbor SNPs with a MAF≥100 (pos. 2-18).

[0322] The siRNA sequences in subset A were selected for more stringent specificity to yield subset B. Subset B includes 145 siRNAs whose base sequences are shown in Table 7.

TABLE 7
Subset B

| | Sense strand | | Antisense strand |
|---|---|---|---|
| SEQ ID NO: | sequence (5′-3′) | SEQ ID NO: | sequence (5′-3′) |
| 4 | AGUUCUCAACACAUCCUUU | 2451 | AAAGGAUGUGUUGAGAACU |
| 5 | GUUCUCAACACAUCCUUUA | 2452 | UAAAGGAUGUGUUGAGAAC |
| 27 | UUCCAAACAUCUACUAGAA | 2474 | UUCUAGUAGAUGUUUGGAA |
| 28 | UCCAAACAUCUACUAGAAA | 2475 | UUUCUAGUAGAUGUUUGGA |
| 37 | CUACUAGAAAAGGAGUGCA | 2484 | UGCACUCCUUUUCUAGUAG |
| 80 | GUGGGGGAAGCUGACUGUG | 2527 | CACAGUCAGCUUCCCCCAC |
| 86 | GAAGCUGACUGUGUCUGGA | 2533 | UCCAGACACAGUCAGCUUC |
| 129 | CAGAGCCCUGCACUCAUCA | 2576 | UGAUGAGUGCAGGGCUCUG |
| 132 | AGCCCUGCACUCAUCAGAC | 2579 | GUCUGAUGAGUGCAGGGCU |
| 134 | CCCUGCACUCAUCAGACCU | 2581 | AGGUCUGAUGAGUGCAGGG |
| 209 | CAAGGAAUGGAACAGACCA | 2656 | UGGUCUGUUCCAUUCCUUG |
| 235 | GGCUGGCCCUGAUGUGCCC | 2682 | GGGCACAUCAGGGCCAGCC |
| 257 | CUGGGAAACAUAGAUGUCA | 2704 | UGACAUCUAUGUUUCCCAG |
| 261 | GAAACAUAGAUGUCAUACA | 2708 | UGUAUGACAUCUAUGUUUC |
| 266 | AUAGAUGUCAUACAUUCAU | 2713 | AUGAAUGUAUGACAUCUAU |
| 271 | UGUCAUACAUUCAUAUCUG | 2718 | CAGAUAUGAAUGUAUGACA |
| 283 | AUAUCUGUGUAAAGGAUUG | 2730 | CAAUCCUUUACACAGAUAU |
| 290 | UGUAAAGGAUUGCAAGAGA | 2737 | UCUCUUGCAAUCCUUUACA |
| 312 | UCUUCAAGAGGAAACCCAA | 2759 | UUGGGUUUCCUCUUGAAGA |
| 357 | AGUUUUCAACUCAUUCGGU | 2804 | ACCGAAUGAGUUGAAAACU |
| 358 | GUUUUCAACUCAUUCGGUA | 2805 | UACCGAAUGAGUUGAAAAC |
| 360 | UUUCAACUCAUUCGGUAUC | 2807 | GAUACCGAAUGAGUUGAAA |
| 361 | UUCAACUCAUUCGGUAUCC | 2808 | GGAUACCGAAUGAGUUGAA |
| 363 | CAACUCAUUCGGUAUCCUU | 2810 | AAGGAUACCGAAUGAGUUG |
| 364 | AACUCAUUCGGUAUCCUUA | 2811 | UAAGGAUACCGAAUGAGUU |
| 365 | ACUCAUUCGGUAUCCUUAU | 2812 | AUAAGGAUACCGAAUGAGU |
| 367 | UCAUUCGGUAUCCUUAUCA | 2814 | UGAUAAGGAUACCGAAUGA |
| 368 | CAUUCGGUAUCCUUAUCAG | 2815 | CUGAUAAGGAUACCGAAUG |
| 371 | UCGGUAUCCUUAUCAGUUG | 2818 | CAACUGAUAAGGAUACCGA |
| 374 | GUAUCCUUAUCAGUUGCAG | 2821 | CUGCAACUGAUAAGGAUAC |
| 381 | UAUCAGUUGCAGCAGGAAU | 2828 | AUUCCUGCUGCAACUGAUA |
| 384 | CAGUUGCAGCAGGAAUUAG | 2831 | CUAAUUCCUGCUGCAACUG |
| 385 | AGUUGCAGCAGGAAUUAGA | 2832 | UCUAAUUCCUGCUGCAACU |
| 391 | AGCAGGAAUUAGAACAACA | 2838 | UGUUGUUCUAAUUCCUGCU |
| 428 | AGUCUAGGAAAGAAUAUCA | 2875 | UGAUAUUCUUUCCUAGACU |
| 434 | GGAAAGAAUAUCACCAGUU | 2881 | AACUGGUGAUAUUCUUUCC |
| 443 | AUCACCAGUUCAGUCUUGG | 2890 | CCAAGACUGAACUGGUGAU |
| 444 | UCACCAGUUCAGUCUUGGC | 2891 | GCCAAGACUGAACUGGUGA |
| 445 | CACCAGUUCAGUCUUGGCU | 2892 | AGCCAAGACUGAACUGGUG |
| 453 | CAGUCUUGGCUAUAUCAGG | 2900 | CCUGAUAUAGCCAAGACUG |
| 461 | GCUAUAUCAGGGAUCUUAA | 2908 | UUAAGAUCCCUGAUAUAGC |
| 469 | AGGGAUCUUAAUCAAUGCA | 2916 | UGCAUUGAUUAAGAUCCCU |
| 476 | UUAAUCAAUGCAAUAAGCU | 2923 | AGCUUAUUGCAUUGAUUAA |
| 478 | AAUCAAUGCAAUAAGCUUG | 2925 | CAAGCUUAUUGCAUUGAUU |
| 479 | AUCAAUGCAAUAAGCUUGA | 2926 | UCAAGCUUAUUGCAUUGAU |
| 480 | UCAAUGCAAUAAGCUUGAC | 2927 | GUCAAGCUUAUUGCAUUGA |
| 482 | AAUGCAAUAAGCUUGACGU | 2929 | ACGUCAAGCUUAUUGCAUU |
| 484 | UGCAAUAAGCUUGACGUUU | 2931 | AAACGUCAAGCUUAUUGCA |
| 486 | CAAUAAGCUUGACGUUUUA | 2933 | UAAAACGUCAAGCUUAUUG |
| 487 | AAUAAGCUUGACGUUUUAU | 2934 | AUAAAACGUCAAGCUUAUU |
| 488 | AUAAGCUUGACGUUUUAUU | 2935 | AAUAAAACGUCAAGCUUAU |
| 496 | GACGUUUUAUUCAUUCCGU | 2943 | ACGGAAUGAAUAAAACGUC |
| 497 | ACGUUUUAUUCAUUCCGUU | 2944 | AACGGAAUGAAUAAAACGU |
| 500 | UUUUAUUCAUUCCGUUACC | 2947 | GGUAACGGAAUGAAUAAAA |
| 501 | UUUAUUCAUUCCGUUACCA | 2948 | UGGUAACGGAAUGAAUAAA |
| 502 | UUAUUCAUUCCGUUACCAU | 2949 | AUGGUAACGGAAUGAAUAA |
| 504 | AUUCAUUCCGUUACCAUUA | 2951 | UAAUGGUAACGGAAUGAAU |
| 507 | CAUUCCGUUACCAUUACUG | 2954 | CAGUAAUGGUAACGGAAUG |
| 510 | UCCGUUACCAUUACUGUAA | 2957 | UUACAGUAAUGGUAACGGA |
| 511 | CCGUUACCAUUACUGUAAC | 2958 | GUUACAGUAAUGGUAACGG |
| 517 | CCAUUACUGUAACCACGAU | 2964 | AUCGUGGUUACAGUAAUGG |
| 518 | CAUUACUGUAACCACGAUC | 2965 | GAUCGUGGUUACAGUAAUG |
| 519 | AUUACUGUAACCACGAUCA | 2966 | UGAUCGUGGUUACAGUAAU |
| 520 | UUACUGUAACCACGAUCAG | 2967 | CUGAUCGUGGUUACAGUAA |
| 522 | ACUGUAACCACGAUCAGUU | 2969 | AACUGAUCGUGGUUACAGU |
| 523 | CUGUAACCACGAUCAGUUG | 2970 | CAACUGAUCGUGGUUACAG |
| 524 | UGUAACCACGAUCAGUUGU | 2971 | ACAACUGAUCGUGGUUACA |
| 525 | GUAACCACGAUCAGUUGUC | 2972 | GACAACUGAUCGUGGUUAC |
| 526 | UAACCACGAUCAGUUGUCA | 2973 | UGACAACUGAUCGUGGUUA |
| 527 | AACCACGAUCAGUUGUCAA | 2974 | UUGACAACUGAUCGUGGUU |
| 528 | ACCACGAUCAGUUGUCAAG | 2975 | CUUGACAACUGAUCGUGGU |
| 530 | CACGAUCAGUUGUCAAGUA | 2977 | UACUUGACAACUGAUCGUG |
| 531 | ACGAUCAGUUGUCAAGUAA | 2978 | UUACUUGACAACUGAUCGU |
| 534 | AUCAGUUGUCAAGUAAUUG | 2981 | CAAUUACUUGACAACUGAU |
| 535 | UCAGUUGUCAAGUAAUUGU | 2982 | ACAAUUACUUGACAACUGA |
| 536 | CAGUUGUCAAGUAAUUGUU | 2983 | AACAAUUACUUGACAACUG |
| 540 | UGUCAAGUAAUUGUUACAU | 2987 | AUGUAACAAUUACUUGACA |
| 551 | UGUUACAUGACUAUGUCCA | 2998 | UGGACAUAGUCAUGUAACA |
| 554 | UACAUGACUAUGUCCAUUU | 3001 | AAAUGGACAUAGUCAUGUA |
| 565 | GUCCAUUUUAAUGGGUACG | 3012 | CGUACCCAUUAAAAUGGAC |
| 567 | CCAUUUUAAUGGGUACGGA | 3014 | UCCGUACCCAUUAAAAUGG |
| 568 | CAUUUUAAUGGGUACGGAU | 3015 | AUCCGUACCCAUUAAAAUG |
| 571 | UUUAAUGGGUACGGAUGGC | 3018 | GCCAUCCGUACCCAUUAAA |
| 572 | UUAAUGGGUACGGAUGGCA | 3019 | UGCCAUCCGUACCCAUUAA |
| 573 | UAAUGGGUACGGAUGGCAU | 3020 | AUGCCAUCCGUACCCAUUA |
| 574 | AAUGGGUACGGAUGGCAUG | 3021 | CAUGCCAUCCGUACCCAUU |
| 578 | GGUACGGAUGGCAUGGUGC | 3025 | GCACCAUGCCAUCCGUACC |
| 588 | GCAUGGUGCUCCUCUUAAG | 3035 | CUUAAGAGGAGCACCAUGC |
| 589 | CAUGGUGCUCCUCUUAAGU | 3036 | ACUUAAGAGGAGCACCAUG |
| 655 | AGUGCUUUGUUGUAGCCCC | 3102 | GGGGCUACAACAAAGCACU |
| 656 | GUGCUUUGUUGUAGCCCCA | 3103 | UGGGGCUACAACAAAGCAC |
| 657 | UGCUUUGUUGUAGCCCCAG | 3104 | CUGGGGCUACAACAAAGCA |
| 659 | CUUUGUUGUAGCCCCAGUG | 3106 | CACUGGGGCUACAACAAAG |
| 691 | AAUUAGAAGCAAUACUUUC | 3138 | GAAAGUAUUGCUUCUAAUU |
| 695 | AGAAGCAAUACUUUCAUGU | 3142 | ACAUGAAAGUAUUGCUUCU |
| 698 | AGCAAUACUUUCAUGUGCU | 3145 | AGCACAUGAAAGUAUUGCU |
| 701 | AAUACUUUCAUGUGCUACC | 3148 | GGUAGCACAUGAAAGUAUU |
| 712 | GUGCUACCUCCUUUCUAUU | 3159 | AAUAGAAAGGAGGUAGCAC |
| 715 | CUACCUCCUUUCUAUUCAG | 3162 | CUGAAUAGAAAGGAGGUAG |
| 718 | CCUCCUUUCUAUUCAGAUG | 3165 | CAUCUGAAUAGAAAGGAGG |
| 732 | AGAUGCAAUAUGAUGGAAA | 3179 | UUUCCAUCAUAUUGCAUCU |
| 741 | AUGAUGGAAAGAGACUAAA | 3188 | UUUAGUCUCUUUCCAUCAU |
| 742 | UGAUGGAAAGAGACUAAAU | 3189 | AUUUAGUCUCUUUCCAUCA |
| 743 | GAUGGAAAGAGACUAAAUG | 3190 | CAUUUAGUCUCUUUCCAUC |
| 774 | GUACUGUAUGGUGCUCCGG | 3221 | CCGGAGCACCAUACAGUAC |
| 775 | UACUGUAUGGUGCUCCGGA | 3222 | UCCGGAGCACCAUACAGUA |
| 776 | ACUGUAUGGUGCUCCGGAG | 3223 | CUCCGGAGCACCAUACAGU |
| 779 | GUAUGGUGCUCCGGAGAUG | 3226 | CAUCUCCGGAGCACCAUAC |
| 780 | UAUGGUGCUCCGGAGAUGG | 3227 | CCAUCUCCGGAGCACCAUA |
| 781 | AUGGUGCUCCGGAGAUGGA | 3228 | UCCAUCUCCGGAGCACCAU |
| 783 | GGUGCUCCGGAGAUGGACA | 3230 | UGUCCAUCUCCGGAGCACC |
| 790 | CGGAGAUGGACAGUAUCUG | 3237 | CAGAUACUGUCCAUCUCCG |
| 801 | AGUAUCUGGAAAAAGUCUA | 3248 | UAGACUUUUUCCAGAUACU |
| 803 | UAUCUGGAAAAAGUCUAUU | 3250 | AAUAGACUUUUUCCAGAUA |
| 807 | UGGAAAAAGUCUAUUAUGA | 3254 | UCAUAAUAGACUUUUUCCA |
| 813 | AAGUCUAUUAUGACAUUCU | 3260 | AGAAUGUCAUAAUAGACUU |
| 814 | AGUCUAUUAUGACAUUCUA | 3261 | UAGAAUGUCAUAAUAGACU |
| 816 | UCUAUUAUGACAUUCUAUC | 3263 | GAUAGAAUGUCAUAAUAGA |
| 818 | UAUUAUGACAUUCUAUCUU | 3265 | AAGAUAGAAUGUCAUAAUA |
| 829 | UCUAUCUUCUUGGUUGAGG | 3276 | CCUCAACCAAGAAGAUAGA |
| 840 | GGUUGAGGAUUGAAAGUAU | 3287 | AUACUUUCAAUCCUCAACC |
| 847 | GAUUGAAAGUAUUUAUCGA | 3294 | UCGAUAAAUACUUUCAAUC |
| 848 | AUUGAAAGUAUUUAUCGAG | 3295 | CUCGAUAAAUACUUUCAAU |
| 850 | UGAAAGUAUUUAUCGAGUG | 3297 | CACUCGAUAAAUACUUUCA |
| 853 | AAGUAUUUAUCGAGUGCUC | 3300 | GAGCACUCGAUAAAUACUU |
| 856 | UAUUUAUCGAGUGCUCAAU | 3303 | AUUGAGCACUCGAUAAAUA |
| 858 | UUUAUCGAGUGCUCAAUGG | 3305 | CCAUUGAGCACUCGAUAAA |
| 1098 | CUGCCAUCCCAUCUAGGAA | 3545 | UUCCUAGAUGGGAUGGCAG |
| 1204 | CGCCUUUGCCCCACCGCCC | 3651 | GGGCGGUGGGGCAAAGGCG |
| 1207 | CUUUGCCCCACCGCCCUGU | 3654 | ACAGGGCGGUGGGGCAAAG |
| 1208 | UUUGCCCCACCGCCCUGUC | 3655 | GACAGGGCGGUGGGGCAAA |
| 1760 | GGUUCAGCCCCCCACCCGG | 4207 | CCGGGUGGGGGGCUGAACC |
| 1761 | GUUCAGCCCCCCACCCGGC | 4208 | GCCGGGUGGGGGGCUGAAC |
| 1914 | CCAUCUGGGAAGUGUACCC | 4361 | GGGUACACUUCCCAGAUGG |
| 1918 | CUGGGAAGUGUACCCAAUA | 4365 | UAUUGGGUACACUUCCCAG |
| 1921 | GGAAGUGUACCCAAUAGCU | 4368 | AGCUAUUGGGUACACUUCC |
| 1922 | GAAGUGUACCCAAUAGCUC | 4369 | GAGCUAUUGGGUACACUUC |
| 1957 | GAGGACAAUGGCGGUUUUG | 4404 | CAAAACCGCCAUUGUCCUC |
| 1958 | AGGACAAUGGCGGUUUUGU | 4405 | ACAAAACCGCCAUUGUCCU |
| 2275 | AGGGACACAAACACCUCGG | 4722 | CCGAGGUGUUUGUGUCCCU |
| 2276 | GGGACACAAACACCUCGGA | 4723 | UCCGAGGUGUUUGUGUCCC |
| 2278 | GACACAAACACCUCGGAAG | 4725 | CUUCCGAGGUGUUUGUGUC |
| 2279 | ACACAAACACCUCGGAAGG | 4726 | CCUUCCGAGGUGUUUGUGU |
| 2281 | ACAAACACCUCGGAAGGCC | 4728 | GGCCUUCCGAGGUGUUUGU |
| 2282 | CAAACACCUCGGAAGGCCG | 4729 | CGGCCUUCCGAGGUGUUUG |

[0323] The siRNAs in subset B had the following characteristics: Cross-reactivity: With 19mer in human MS4A4E mRNA; Specificity category: For human: AS2 or better, SS3 or better; miRNA seeds: AS+SS strand: seed region not conserved in human, mouse, and rat and not present in >4 species; Off-target frequency: ≤20 human off-targets matched with 2 mismatches in antisense strand; and SNPs: siRNA target sites do not harbor SNPs with a MAF≥1% (pos. 2-18).

[0324] The siRNA sequences in subset B were further selected for absence of seed regions in the AS strand that are identical to a seed region of known human miRNA to yield subset C. Subset C includes 107 siRNAs whose base sequences are shown in Table 8.

TABLE 8
Subset C

| | Sense strand | | Antisense strand |
|---|---|---|---|
| SEQ ID NO: | sequence (5′-3′) | SEQ ID NO: | sequence (5′-3′) |
| 5 | GUUCUCAACACAUCCUUUA | 2452 | UAAAGGAUGUGUUGAGAAC |
| 27 | UUCCAAACAUCUACUAGAA | 2474 | UUCUAGUAGAUGUUUGGAA |
| 28 | UCCAAACAUCUACUAGAAA | 2475 | UUUCUAGUAGAUGUUUGGA |
| 37 | CUACUAGAAAAGGAGUGCA | 2484 | UGCACUCCUUUUCUAGUAG |
| 43 | GAAAAGGAGUGCAGAUUUA | 2490 | UAAAUCUGCACUCCUUUUC |
| 80 | GUGGGGGAAGCUGACUGUG | 2527 | CACAGUCAGCUUCCCCCAC |
| 86 | GAAGCUGACUGUGUCUGGA | 2533 | UCCAGACACAGUCAGCUUC |
| 129 | CAGAGCCCUGCACUCAUCA | 2576 | UGAUGAGUGCAGGGCUCUG |
| 235 | GGCUGGCCCUGAUGUGCCC | 2682 | GGGCACAUCAGGGCCAGCC |
| 261 | GAAACAUAGAUGUCAUACA | 2708 | UGUAUGACAUCUAUGUUUC |
| 266 | AUAGAUGUCAUACAUUCAU | 2713 | AUGAAUGUAUGACAUCUAU |
| 271 | UGUCAUACAUUCAUAUCUG | 2718 | CAGAUAUGAAUGUAUGACA |
| 290 | UGUAAAGGAUUGCAAGAGA | 2737 | UCUCUUGCAAUCCUUUACA |
| 357 | AGUUUUCAACUCAUUCGGU | 2804 | ACCGAAUGAGUUGAAAACU |
| 358 | GUUUUCAACUCAUUCGGUA | 2805 | UACCGAAUGAGUUGAAAAC |
| 360 | UUUCAACUCAUUCGGUAUC | 2807 | GAUACCGAAUGAGUUGAAA |
| 361 | UUCAACUCAUUCGGUAUCC | 2808 | GGAUACCGAAUGAGUUGAA |
| 363 | CAACUCAUUCGGUAUCCUU | 2810 | AAGGAUACCGAAUGAGUUG |
| 365 | ACUCAUUCGGUAUCCUUAU | 2812 | AUAAGGAUACCGAAUGAGU |
| 367 | UCAUUCGGUAUCCUUAUCA | 2814 | UGAUAAGGAUACCGAAUGA |
| 371 | UCGGUAUCCUUAUCAGUUG | 2818 | CAACUGAUAAGGAUACCGA |
| 374 | GUAUCCUUAUCAGUUGCAG | 2821 | CUGCAACUGAUAAGGAUAC |
| 384 | CAGUUGCAGCAGGAAUUAG | 2831 | CUAAUUCCUGCUGCAACUG |
| 391 | AGCAGGAAUUAGAACAACA | 2838 | UGUUGUUCUAAUUCCUGCU |
| 434 | GGAAAGAAUAUCACCAGUU | 2881 | AACUGGUGAUAUUCUUUCC |
| 443 | AUCACCAGUUCAGUCUUGG | 2890 | CCAAGACUGAACUGGUGAU |
| 444 | UCACCAGUUCAGUCUUGGC | 2891 | GCCAAGACUGAACUGGUGA |
| 453 | CAGUCUUGGCUAUAUCAGG | 2900 | CCUGAUAUAGCCAAGACUG |
| 461 | GCUAUAUCAGGGAUCUUAA | 2908 | UUAAGAUCCCUGAUAUAGC |
| 469 | AGGGAUCUUAAUCAAUGCA | 2916 | UGCAUUGAUUAAGAUCCCU |
| 476 | UUAAUCAAUGCAAUAAGCU | 2923 | AGCUUAUUGCAUUGAUUAA |
| 479 | AUCAAUGCAAUAAGCUUGA | 2926 | UCAAGCUUAUUGCAUUGAU |
| 480 | UCAAUGCAAUAAGCUUGAC | 2927 | GUCAAGCUUAUUGCAUUGA |
| 482 | AAUGCAAUAAGCUUGACGU | 2929 | ACGUCAAGCUUAUUGCAUU |
| 484 | UGCAAUAAGCUUGACGUUU | 2931 | AAACGUCAAGCUUAUUGCA |
| 487 | AAUAAGCUUGACGUUUUAU | 2934 | AUAAAACGUCAAGCUUAUU |
| 496 | GACGUUUUAUUCAUUCCGU | 2943 | ACGGAAUGAAUAAAACGUC |
| 497 | ACGUUUUAUUCAUUCCGUU | 2944 | AACGGAAUGAAUAAAACGU |
| 500 | UUUUAUUCAUUCCGUUACC | 2947 | GGUAACGGAAUGAAUAAAA |
| 501 | UUUAUUCAUUCCGUUACCA | 2948 | UGGUAACGGAAUGAAUAAA |
| 502 | UUAUUCAUUCCGUUACCAU | 2949 | AUGGUAACGGAAUGAAUAA |
| 504 | AUUCAUUCCGUUACCAUUA | 2951 | UAAUGGUAACGGAAUGAAU |
| 507 | CAUUCCGUUACCAUUACUG | 2954 | CAGUAAUGGUAACGGAAUG |
| 511 | CCGUUACCAUUACUGUAAC | 2958 | GUUACAGUAAUGGUAACGG |
| 518 | CAUUACUGUAACCACGAUC | 2965 | GAUCGUGGUUACAGUAAUG |
| 519 | AUUACUGUAACCACGAUCA | 2966 | UGAUCGUGGUUACAGUAAU |
| 520 | UUACUGUAACCACGAUCAG | 2967 | CUGAUCGUGGUUACAGUAA |
| 522 | ACUGUAACCACGAUCAGUU | 2969 | AACUGAUCGUGGUUACAGU |
| 523 | CUGUAACCACGAUCAGUUG | 2970 | CAACUGAUCGUGGUUACAG |
| 524 | UGUAACCACGAUCAGUUGU | 2971 | ACAACUGAUCGUGGUUACA |
| 525 | GUAACCACGAUCAGUUGUC | 2972 | GACAACUGAUCGUGGUUAC |
| 527 | AACCACGAUCAGUUGUCAA | 2974 | UUGACAACUGAUCGUGGUU |
| 530 | CACGAUCAGUUGUCAAGUA | 2977 | UACUUGACAACUGAUCGUG |
| 531 | ACGAUCAGUUGUCAAGUAA | 2978 | UUACUUGACAACUGAUCGU |
| 534 | AUCAGUUGUCAAGUAAUUG | 2981 | CAAUUACUUGACAACUGAU |
| 540 | UGUCAAGUAAUUGUUACAU | 2987 | AUGUAACAAUUACUUGACA |
| 551 | UGUUACAUGACUAUGUCCA | 2998 | UGGACAUAGUCAUGUAACA |
| 554 | UACAUGACUAUGUCCAUUU | 3001 | AAAUGGACAUAGUCAUGUA |
| 565 | GUCCAUUUUAAUGGGUACG | 3012 | CGUACCCAUUAAAAUGGAC |
| 568 | CAUUUUAAUGGGUACGGAU | 3015 | AUCCGUACCCAUUAAAAUG |
| 571 | UUUAAUGGGUACGGAUGGC | 3018 | GCCAUCCGUACCCAUUAAA |
| 572 | UUAAUGGGUACGGAUGGCA | 3019 | UGCCAUCCGUACCCAUUAA |
| 574 | AAUGGGUACGGAUGGCAUG | 3021 | CAUGCCAUCCGUACCCAUU |
| 578 | GGUACGGAUGGCAUGGUGC | 3025 | GCACCAUGCCAUCCGUACC |
| 589 | CAUGGUGCUCCUCUUAAGU | 3036 | ACUUAAGAGGAGCACCAUG |
| 659 | CUUUGUUGUAGCCCCAGUG | 3106 | CACUGGGGCUACAACAAAG |
| 696 | GAAGCAAUACUUUCAUGUG | 3143 | CACAUGAAAGUAUUGCUUC |
| 701 | AAUACUUUCAUGUGCUACC | 3148 | GGUAGCACAUGAAAGUAUU |
| 712 | GUGCUACCUCCUUUCUAUU | 3159 | AAUAGAAAGGAGGUAGCAC |
| 741 | AUGAUGGAAAGAGACUAAA | 3188 | UUUAGUCUCUUUCCAUCAU |
| 742 | UGAUGGAAAGAGACUAAAU | 3189 | AUUUAGUCUCUUUCCAUCA |
| 743 | GAUGGAAAGAGACUAAAUG | 3190 | CAUUUAGUCUCUUUCCAUC |
| 774 | GUACUGUAUGGUGCUCCGG | 3221 | CCGGAGCACCAUACAGUAC |
| 776 | ACUGUAUGGUGCUCCGGAG | 3223 | CUCCGGAGCACCAUACAGU |
| 779 | GUAUGGUGCUCCGGAGAUG | 3226 | CAUCUCCGGAGCACCAUAC |
| 780 | UAUGGUGCUCCGGAGAUGG | 3227 | CCAUCUCCGGAGCACCAUA |
| 781 | AUGGUGCUCCGGAGAUGGA | 3228 | UCCAUCUCCGGAGCACCAU |
| 783 | GGUGCUCCGGAGAUGGACA | 3230 | UGUCCAUCUCCGGAGCACC |
| 790 | CGGAGAUGGACAGUAUCUG | 3237 | CAGAUACUGUCCAUCUCCG |
| 801 | AGUAUCUGGAAAAAGUCUA | 3248 | UAGACUUUUUCCAGAUACU |
| 803 | UAUCUGGAAAAAGUCUAUU | 3250 | AAUAGACUUUUUCCAGAUA |
| 807 | UGGAAAAAGUCUAUUAUGA | 3254 | UCAUAAUAGACUUUUUCCA |
| 813 | AAGUCUAUUAUGACAUUCU | 3260 | AGAAUGUCAUAAUAGACUU |
| 814 | AGUCUAUUAUGACAUUCUA | 3261 | UAGAAUGUCAUAAUAGACU |
| 816 | UCUAUUAUGACAUUCUAUC | 3263 | GAUAGAAUGUCAUAAUAGA |
| 818 | UAUUAUGACAUUCUAUCUU | 3265 | AAGAUAGAAUGUCAUAAUA |
| 829 | UCUAUCUUCUUGGUUGAGG | 3276 | CCUCAACCAAGAAGAUAGA |
| 840 | GGUUGAGGAUUGAAAGUAU | 3287 | AUACUUUCAAUCCUCAACC |
| 847 | GAUUGAAAGUAUUUAUCGA | 3294 | UCGAUAAAUACUUUCAAUC |
| 848 | AUUGAAAGUAUUUAUCGAG | 3295 | CUCGAUAAAUACUUUCAAU |
| 850 | UGAAAGUAUUUAUCGAGUG | 3297 | CACUCGAUAAAUACUUUCA |
| 853 | AAGUAUUUAUCGAGUGCUC | 3300 | GAGCACUCGAUAAAUACUU |
| 856 | UAUUUAUCGAGUGCUCAAU | 3303 | AUUGAGCACUCGAUAAAUA |
| 858 | UUUAUCGAGUGCUCAAUGG | 3305 | CCAUUGAGCACUCGAUAAA |
| 1204 | CGCCUUUGCCCCACCGCCC | 3651 | GGGCGGUGGGGCAAAGGCG |
| 1208 | UUUGCCCCACCGCCCUGUC | 3655 | GACAGGGCGGUGGGGCAAA |
| 1760 | GGUUCAGCCCCCCACCCGG | 4207 | CCGGGUGGGGGGCUGAACC |
| 1761 | GUUCAGCCCCCCACCCGGC | 4208 | GCCGGGUGGGGGGCUGAAC |
| 1914 | CCAUCUGGGAAGUGUACCC | 4361 | GGGUACACUUCCCAGAUGG |
| 1918 | CUGGGAAGUGUACCCAAUA | 4365 | UAUUGGGUACACUUCCCAG |
| 1921 | GGAAGUGUACCCAAUAGCU | 4368 | AGCUAUUGGGUACACUUCC |
| 1922 | GAAGUGUACCCAAUAGCUC | 4369 | GAGCUAUUGGGUACACUUC |
| 2275 | AGGGACACAAACACCUCGG | 4722 | CCGAGGUGUUUGUGUCCCU |
| 2276 | GGGACACAAACACCUCGGA | 4723 | UCCGAGGUGUUUGUGUCCC |
| 2278 | GACACAAACACCUCGGAAG | 4725 | CUUCCGAGGUGUUUGUGUC |
| 2279 | ACACAAACACCUCGGAAGG | 4726 | CCUUCCGAGGUGUUUGUGU |
| 2282 | CAAACACCUCGGAAGGCCG | 4729 | CGGCCUUCCGAGGUGUUUG |

[0325] The siRNAs in subset C had the following characteristics: Cross-reactivity: With 19mer in human MS4A4E mRNA; Specificity category: For human: AS2 or better, SS3 or better; miRNA seeds: AS+SS strand: seed region not conserved in human, mouse, and rat and not present in >4 species. AS strand: seed region not identical to seed region of known human miRNA; Off-target frequency: ≤30 human off-targets matched with 2 mismatches by antisense strand; and SNPs: siRNA target sites do not harbor SNPs with a MAF≥1% (pos. 2-18).

[0326] The siRNA sequences in subset C were also selected for absence of seed regions in the AS or S strands that are identical to a seed region of known human miRNA in addition to having an off-target frequency of ≤30 human off-targets matched with 2 mismatches by antisense strand to yield subset D. Subset D includes 76 siRNAs whose base sequences are shown in Table 9.

TABLE 9
Subset D

| | Sense strand | | Antisense strand |
|---|---|---|---|
| SEQ ID NO: | sequence (5′-3′) | SEQ ID NO: | sequence (5′-3′) |
| 5 | GUUCUCAACACAUCCUUUA | 2452 | UAAAGGAUGUGUUGAGAAC |
| 27 | UUCCAAACAUCUACUAGAA | 2474 | UUCUAGUAGAUGUUUGGAA |
| 28 | UCCAAACAUCUACUAGAAA | 2475 | UUUCUAGUAGAUGUUUGGA |
| 37 | CUACUAGAAAAGGAGUGCA | 2484 | UGCACUCCUUUUCUAGUAG |
| 43 | GAAAAGGAGUGCAGAUUUA | 2490 | UAAAUCUGCACUCCUUUUC |
| 129 | CAGAGCCCUGCACUCAUCA | 2576 | UGAUGAGUGCAGGGCUCUG |
| 261 | GAAACAUAGAUGUCAUACA | 2708 | UGUAUGACAUCUAUGUUUC |
| 266 | AUAGAUGUCAUACAUUCAU | 2713 | AUGAAUGUAUGACAUCUAU |
| 271 | UGUCAUACAUUCAUAUCUG | 2718 | CAGAUAUGAAUGUAUGACA |
| 290 | UGUAAAGGAUUGCAAGAGA | 2737 | UCUCUUGCAAUCCUUUACA |
| 357 | AGUUUUCAACUCAUUCGGU | 2804 | ACCGAAUGAGUUGAAAACU |
| 360 | UUUCAACUCAUUCGGUAUC | 2807 | GAUACCGAAUGAGUUGAAA |
| 361 | UUCAACUCAUUCGGUAUCC | 2808 | GGAUACCGAAUGAGUUGAA |
| 367 | UCAUUCGGUAUCCUUAUCA | 2814 | UGAUAAGGAUACCGAAUGA |
| 371 | UCGGUAUCCUUAUCAGUUG | 2818 | CAACUGAUAAGGAUACCGA |
| 384 | CAGUUGCAGCAGGAAUUAG | 2831 | CUAAUUCCUGCUGCAACUG |
| 434 | GGAAAGAAUAUCACCAGUU | 2881 | AACUGGUGAUAUUCUUUCC |
| 453 | CAGUCUUGGCUAUAUCAGG | 2900 | CCUGAUAUAGCCAAGACUG |
| 461 | GCUAUAUCAGGGAUCUUAA | 2908 | UUAAGAUCCCUGAUAUAGC |
| 476 | UUAAUCAAUGCAAUAAGCU | 2923 | AGCUUAUUGCAUUGAUUAA |
| 479 | AUCAAUGCAAUAAGCUUGA | 2926 | UCAAGCUUAUUGCAUUGAU |
| 480 | UCAAUGCAAUAAGCUUGAC | 2927 | GUCAAGCUUAUUGCAUUGA |
| 482 | AAUGCAAUAAGCUUGACGU | 2929 | ACGUCAAGCUUAUUGCAUU |
| 484 | UGCAAUAAGCUUGACGUUU | 2931 | AAACGUCAAGCUUAUUGCA |
| 487 | AAUAAGCUUGACGUUUUAU | 2934 | AUAAAACGUCAAGCUUAUU |
| 496 | GACGUUUUAUUCAUUCCGU | 2943 | ACGGAAUGAAUAAAACGUC |
| 497 | ACGUUUUAUUCAUUCCGUU | 2944 | AACGGAAUGAAUAAAACGU |
| 500 | UUUUAUUCAUUCCGUUACC | 2947 | GGUAACGGAAUGAAUAAAA |
| 501 | UUUAUUCAUUCCGUUACCA | 2948 | UGGUAACGGAAUGAAUAAA |
| 504 | AUUCAUUCCGUUACCAUUA | 2951 | UAAUGGUAACGGAAUGAAU |
| 507 | CAUUCCGUUACCAUUACUG | 2954 | CAGUAAUGGUAACGGAAUG |
| 511 | CCGUUACCAUUACUGUAAC | 2958 | GUUACAGUAAUGGUAACGG |
| 519 | AUUACUGUAACCACGAUCA | 2966 | UGAUCGUGGUUACAGUAAU |
| 522 | ACUGUAACCACGAUCAGUU | 2969 | AACUGAUCGUGGUUACAGU |
| 523 | CUGUAACCACGAUCAGUUG | 2970 | CAACUGAUCGUGGUUACAG |
| 524 | UGUAACCACGAUCAGUUGU | 2971 | ACAACUGAUCGUGGUUACA |
| 525 | GUAACCACGAUCAGUUGUC | 2972 | GACAACUGAUCGUGGUUAC |
| 527 | AACCACGAUCAGUUGUCAA | 2974 | UUGACAACUGAUCGUGGUU |
| 530 | CACGAUCAGUUGUCAAGUA | 2977 | UACUUGACAACUGAUCGUG |
| 531 | ACGAUCAGUUGUCAAGUAA | 2978 | UUACUUGACAACUGAUCGU |
| 534 | AUCAGUUGUCAAGUAAUUG | 2981 | CAAUUACUUGACAACUGAU |
| 540 | UGUCAAGUAAUUGUUACAU | 2987 | AUGUAACAAUUACUUGACA |
| 551 | UGUUACAUGACUAUGUCCA | 2998 | UGGACAUAGUCAUGUAACA |
| 554 | UACAUGACUAUGUCCAUUU | 3001 | AAAUGGACAUAGUCAUGUA |
| 565 | GUCCAUUUUAAUGGGUACG | 3012 | CGUACCCAUUAAAAUGGAC |
| 568 | CAUUUUAAUGGGUACGGAU | 3015 | AUCCGUACCCAUUAAAAUG |
| 571 | UUUAAUGGGUACGGAUGGC | 3018 | GCCAUCCGUACCCAUUAAA |
| 572 | UUAAUGGGUACGGAUGGCA | 3019 | UGCCAUCCGUACCCAUUAA |
| 574 | AAUGGGUACGGAUGGCAUG | 3021 | CAUGCCAUCCGUACCCAUU |
| 578 | GGUACGGAUGGCAUGGUGC | 3025 | GCACCAUGCCAUCCGUACC |
| 589 | CAUGGUGCUCCUCUUAAGU | 3036 | ACUUAAGAGGAGCACCAUG |
| 659 | CUUUGUUGUAGCCCCAGUG | 3106 | CACUGGGGCUACAACAAAG |
| 701 | AAUACUUUCAUGUGCUACC | 3148 | GGUAGCACAUGAAAGUAUU |
| 780 | UAUGGUGCUCCGGAGAUGG | 3227 | CCAUCUCCGGAGCACCAUA |
| 781 | AUGGUGCUCCGGAGAUGGA | 3228 | UCCAUCUCCGGAGCACCAU |
| 783 | GGUGCUCCGGAGAUGGACA | 3230 | UGUCCAUCUCCGGAGCACC |
| 801 | AGUAUCUGGAAAAAGUCUA | 3248 | UAGACUUUUUCCAGAUACU |
| 813 | AAGUCUAUUAUGACAUUCU | 3260 | AGAAUGUCAUAAUAGACUU |
| 816 | UCUAUUAUGACAUUCUAUC | 3263 | GAUAGAAUGUCAUAAUAGA |
| 818 | UAUUAUGACAUUCUAUCUU | 3265 | AAGAUAGAAUGUCAUAAUA |
| 829 | UCUAUCUUCUUGGUUGAGG | 3276 | CCUCAACCAAGAAGAUAGA |
| 840 | GGUUGAGGAUUGAAAGUAU | 3287 | AUACUUUCAAUCCUCAACC |
| 847 | GAUUGAAAGUAUUUAUCGA | 3294 | UCGAUAAAUACUUUCAAUC |
| 850 | UGAAAGUAUUUAUCGAGUG | 3297 | CACUCGAUAAAUACUUUCA |
| 853 | AAGUAUUUAUCGAGUGCUC | 3300 | GAGCACUCGAUAAAUACUU |
| 856 | UAUUUAUCGAGUGCUCAAU | 3303 | AUUGAGCACUCGAUAAAUA |
| 858 | UUUAUCGAGUGCUCAAUGG | 3305 | CCAUUGAGCACUCGAUAAA |
| 1204 | CGCCUUUGCCCCACCGCCC | 3651 | GGGCGGUGGGGCAAAGGCG |
| 1208 | UUUGCCCCACCGCCCUGUC | 3655 | GACAGGGCGGUGGGGCAAA |
| 1760 | GGUUCAGCCCCCCACCCGG | 4207 | CCGGGUGGGGGGCUGAACC |
| 1761 | GUUCAGCCCCCCACCCGGC | 4208 | GCCGGGUGGGGGGCUGAAC |
| 1914 | CCAUCUGGGAAGUGUACCC | 4361 | GGGUACACUUCCCAGAUGG |
| 1918 | CUGGGAAGUGUACCCAAUA | 4365 | UAUUGGGUACACUUCCCAG |
| 2275 | AGGGACACAAACACCUCGG | 4722 | CCGAGGUGUUUGUGUCCCU |
| 2276 | GGGACACAAACACCUCGGA | 4723 | UCCGAGGUGUUUGUGUCCC |
| 2282 | CAAACACCUCGGAAGGCCG | 4729 | CGGCCUUCCGAGGUGUUUG |

[0327] The siRNA sequences in subset D were also selected to have an off-target frequency of <20 human off-targets matched with 2 mismatches by antisense strand to yield subset E. Subset E includes siRNAs whose base sequences are shown in Table 10.

TABLE 10
Subset E

| | Sense strand | | Antisense strand |
|---|---|---|---|
| SEQ ID NO: | sequence (5′-3′) | SEQ ID NO: | sequence (5′-3′) |
| 5 | GUUCUCAACACAUCCUUUA | 2452 | UAAAGGAUGUGUUGAGAAC |
| 27 | UUCCAAACAUCUACUAGAA | 2474 | UUCUAGUAGAUGUUUGGAA |
| 28 | UCCAAACAUCUACUAGAAA | 2475 | UUUCUAGUAGAUGUUUGGA |
| 37 | CUACUAGAAAAGGAGUGCA | 2484 | UGCACUCCUUUUCUAGUAG |
| 129 | CAGAGCCCUGCACUCAUCA | 2576 | UGAUGAGUGCAGGGCUCUG |
| 261 | GAAACAUAGAUGUCAUACA | 2708 | UGUAUGACAUCUAUGUUUC |
| 266 | AUAGAUGUCAUACAUUCAU | 2713 | AUGAAUGUAUGACAUCUAU |
| 271 | UGUCAUACAUUCAUAUCUG | 2718 | CAGAUAUGAAUGUAUGACA |
| 290 | UGUAAAGGAUUGCAAGAGA | 2737 | UCUCUUGCAAUCCUUUACA |
| 357 | AGUUUUCAACUCAUUCGGU | 2804 | ACCGAAUGAGUUGAAAACU |
| 360 | UUUCAACUCAUUCGGUAUC | 2807 | GAUACCGAAUGAGUUGAAA |
| 361 | UUCAACUCAUUCGGUAUCC | 2808 | GGAUACCGAAUGAGUUGAA |
| 367 | UCAUUCGGUAUCCUUAUCA | 2814 | UGAUAAGGAUACCGAAUGA |
| 371 | UCGGUAUCCUUAUCAGUUG | 2818 | CAACUGAUAAGGAUACCGA |
| 384 | CAGUUGCAGCAGGAAUUAG | 2831 | CUAAUUCCUGCUGCAACUG |
| 434 | GGAAAGAAUAUCACCAGUU | 2881 | AACUGGUGAUAUUCUUUCC |
| 453 | CAGUCUUGGCUAUAUCAGG | 2900 | CCUGAUAUAGCCAAGACUG |
| 461 | GCUAUAUCAGGGAUCUUAA | 2908 | UUAAGAUCCCUGAUAUAGC |
| 476 | UUAAUCAAUGCAAUAAGCU | 2923 | AGCUUAUUGCAUUGAUUAA |
| 479 | AUCAAUGCAAUAAGCUUGA | 2926 | UCAAGCUUAUUGCAUUGAU |
| 480 | UCAAUGCAAUAAGCUUGAC | 2927 | GUCAAGCUUAUUGCAUUGA |
| 482 | AAUGCAAUAAGCUUGACGU | 2929 | ACGUCAAGCUUAUUGCAUU |
| 484 | UGCAAUAAGCUUGACGUUU | 2931 | AAACGUCAAGCUUAUUGCA |
| 487 | AAUAAGCUUGACGUUUUAU | 2934 | AUAAAACGUCAAGCUUAUU |
| 496 | GACGUUUUAUUCAUUCCGU | 2943 | ACGGAAUGAAUAAAACGUC |
| 497 | ACGUUUUAUUCAUUCCGUU | 2944 | AACGGAAUGAAUAAAACGU |
| 500 | UUUUAUUCAUUCCGUUACC | 2947 | GGUAACGGAAUGAAUAAAA |
| 501 | UUUAUUCAUUCCGUUACCA | 2948 | UGGUAACGGAAUGAAUAAA |
| 504 | AUUCAUUCCGUUACCAUUA | 2951 | UAAUGGUAACGGAAUGAAU |
| 507 | CAUUCCGUUACCAUUACUG | 2954 | CAGUAAUGGUAACGGAAUG |
| 511 | CCGUUACCAUUACUGUAAC | 2958 | GUUACAGUAAUGGUAACGG |
| 519 | AUUACUGUAACCACGAUCA | 2966 | UGAUCGUGGUUACAGUAAU |
| 522 | ACUGUAACCACGAUCAGUU | 2969 | AACUGAUCGUGGUUACAGU |
| 523 | CUGUAACCACGAUCAGUUG | 2970 | CAACUGAUCGUGGUUACAG |
| 524 | UGUAACCACGAUCAGUUGU | 2971 | ACAACUGAUCGUGGUUACA |
| 525 | GUAACCACGAUCAGUUGUC | 2972 | GACAACUGAUCGUGGUUAC |
| 527 | AACCACGAUCAGUUGUCAA | 2974 | UUGACAACUGAUCGUGGUU |
| 530 | CACGAUCAGUUGUCAAGUA | 2977 | UACUUGACAACUGAUCGUG |
| 531 | ACGAUCAGUUGUCAAGUAA | 2978 | UUACUUGACAACUGAUCGU |
| 534 | AUCAGUUGUCAAGUAAUUG | 2981 | CAAUUACUUGACAACUGAU |
| 540 | UGUCAAGUAAUUGUUACAU | 2987 | AUGUAACAAUUACUUGACA |
| 551 | UGUUACAUGACUAUGUCCA | 2998 | UGGACAUAGUCAUGUAACA |
| 554 | UACAUGACUAUGUCCAUUU | 3001 | AAAUGGACAUAGUCAUGUA |
| 565 | GUCCAUUUUAAUGGGUACG | 3012 | CGUACCCAUUAAAAUGGAC |
| 568 | CAUUUUAAUGGGUACGGAU | 3015 | AUCCGUACCCAUUAAAAUG |
| 571 | UUUAAUGGGUACGGAUGGC | 3018 | GCCAUCCGUACCCAUUAAA |
| 572 | UUAAUGGGUACGGAUGGCA | 3019 | UGCCAUCCGUACCCAUUAA |
| 574 | AAUGGGUACGGAUGGCAUG | 3021 | CAUGCCAUCCGUACCCAUU |
| 578 | GGUACGGAUGGCAUGGUGC | 3025 | GCACCAUGCCAUCCGUACC |
| 589 | CAUGGUGCUCCUCUUAAGU | 3036 | ACUUAAGAGGAGCACCAUG |
| 659 | CUUUGUUGUAGCCCCAGUG | 3106 | CACUGGGGCUACAACAAAG |
| 701 | AAUACUUUCAUGUGCUACC | 3148 | GGUAGCACAUGAAAGUAUU |
| 780 | UAUGGUGCUCCGGAGAUGG | 3227 | CCAUCUCCGGAGCACCAUA |
| 781 | AUGGUGCUCCGGAGAUGGA | 3228 | UCCAUCUCCGGAGCACCAU |
| 783 | GGUGCUCCGGAGAUGGACA | 3230 | UGUCCAUCUCCGGAGCACC |
| 801 | AGUAUCUGGAAAAAGUCUA | 3248 | UAGACUUUUUCCAGAUACU |
| 813 | AAGUCUAUUAUGACAUUCU | 3260 | AGAAUGUCAUAAUAGACUU |
| 816 | UCUAUUAUGACAUUCUAUC | 3263 | GAUAGAAUGUCAUAAUAGA |
| 818 | UAUUAUGACAUUCUAUCUU | 3265 | AAGAUAGAAUGUCAUAAUA |
| 829 | UCUAUCUUCUUGGUUGAGG | 3276 | CCUCAACCAAGAAGAUAGA |
| 840 | GGUUGAGGAUUGAAAGUAU | 3287 | AUACUUUCAAUCCUCAACC |
| 847 | GAUUGAAAGUAUUUAUCGA | 3294 | UCGAUAAAUACUUUCAAUC |
| 850 | UGAAAGUAUUUAUCGAGUG | 3297 | CACUCGAUAAAUACUUUCA |
| 853 | AAGUAUUUAUCGAGUGCUC | 3300 | GAGCACUCGAUAAAUACUU |
| 856 | UAUUUAUCGAGUGCUCAAU | 3303 | AUUGAGCACUCGAUAAAUA |
| 858 | UUUAUCGAGUGCUCAAUGG | 3305 | CCAUUGAGCACUCGAUAAA |
| 1204 | CGCCUUUGCCCCACCGCCC | 3651 | GGGCGGUGGGGCAAAGGCG |
| 1208 | UUUGCCCCACCGCCCUGUC | 3655 | GACAGGGCGGUGGGGCAAA |
| 1760 | GGUUCAGCCCCCCACCCGG | 4207 | CCGGGUGGGGGGCUGAACC |
| 1761 | GUUCAGCCCCCCACCCGGC | 4208 | GCCGGGUGGGGGGCUGAAC |
| 1914 | CCAUCUGGGAAGUGUACCC | 4361 | GGGUACACUUCCCAGAUGG |
| 1918 | CUGGGAAGUGUACCCAAUA | 4365 | UAUUGGGUACACUUCCCAG |
| 2275 | AGGGACACAAACACCUCGG | 4722 | CCGAGGUGUUUGUGUCCCU |
| 2276 | GGGACACAAACACCUCGGA | 4723 | UCCGAGGUGUUUGUGUCCC |
| 2282 | CAAACACCUCGGAAGGCCG | 4729 | CGGCCUUCCGAGGUGUUUG |

[0328] Some examples of therapeutic siRNAs from subset E were selected for properties advantageous for use in vivo. These 21 siRNAs are in subset F and whose base sequences are shown in Table 11.

TABLE 11
Subset F

| | Sense strand | | Antisense strand |
|---|---|---|---|
| SEQ ID NO: | sequence (5′-3′) | SEQ ID NO: | sequence (5′-3′) |
| 5 | GUUCUCAACACAUCCUUUA | 2452 | UAAAGGAUGUGUUGAGAAC |
| 27 | UUCCAAACAUCUACUAGAA | 2474 | UUCUAGUAGAUGUUUGGAA |
| 266 | AUAGAUGUCAUACAUUCAU | 2713 | AUGAAUGUAUGACAUCUAU |
| 271 | UGUCAUACAUUCAUAUCUG | 2718 | CAGAUAUGAAUGUAUGACA |
| 357 | AGUUUUCAACUCAUUCGGU | 2804 | ACCGAAUGAGUUGAAAACU |
| 361 | UUCAACUCAUUCGGUAUCC | 2808 | GGAUACCGAAUGAGUUGAA |
| 367 | UCAUUCGGUAUCCUUAUCA | 2814 | UGAUAAGGAUACCGAAUGA |
| 371 | UCGGUAUCCUUAUCAGUUG | 2818 | CAACUGAUAAGGAUACCGA |
| 476 | UUAAUCAAUGCAAUAAGCU | 2923 | AGCUUAUUGCAUUGAUUAA |
| 479 | AUCAAUGCAAUAAGCUUGA | 2926 | UCAAGCUUAUUGCAUUGAU |
| 480 | UCAAUGCAAUAAGCUUGAC | 2927 | GUCAAGCUUAUUGCAUUGA |
| 482 | AAUGCAAUAAGCUUGACGU | 2929 | ACGUCAAGCUUAUUGCAUU |
| 504 | AUUCAUUCCGUUACCAUUA | 2951 | UAAUGGUAACGGAAUGAAU |
| 519 | AUUACUGUAACCACGAUCA | 2966 | UGAUCGUGGUUACAGUAAU |
| 534 | AUCAGUUGUCAAGUAAUUG | 2981 | CAAUUACUUGACAACUGAU |
| 540 | UGUCAAGUAAUUGUUACAU | 2987 | AUGUAACAAUUACUUGACA |
| 551 | UGUUACAUGACUAUGUCCA | 2998 | UGGACAUAGUCAUGUAACA |
| 554 | UACAUGACUAUGUCCAUUU | 3001 | AAAUGGACAUAGUCAUGUA |
| 568 | CAUUUUAAUGGGUACGGAU | 3015 | AUCCGUACCCAUUAAAAUG |
| 853 | AAGUAUUUAUCGAGUGCUC | 3300 | GAGCACUCGAUAAAUACUU |
| 858 | UUUAUCGAGUGCUCAAUGG | 3305 | CCAUUGAGCACUCGAUAAA |

[0329] In some cases, the sense strand of any of the siRNAs of subset F comprises siRNA with a particular modification pattern. In this modification pattern, position 9 counting from the 5′ end of the of the sense strand is has the 2′F modification. If position 9 of the sense strand is a pyrimidine, then all purines in the sense strand have the 2′OMe modification. If position 9 is the only pyrimidine between positions 5 and 11 of the sense stand, then position 9 is the only position with the 2′F modification in the sense strand. If position 9 and only one other base between positions 5 and 11 of the sense strand are pyrimidines, then both of these pyrimidines are the only two positions with the 2′F modification in the sense strand. If position 9 and only two other bases between positions 5 and 11 of the sense strand are pyrimidines, and those two other pyrimidines are in adjacent positions so that there would be not three 2′F modifications in a row, then any combination of 2′F modifications can be made that give three 2′F modifications in total. If there are >2 pyrimidines between positions 5 and 11 of the sense strand, then all combinations of pyrimidines having the 2′F modification are allowed that have three to five 2′F modifications in total, provided that the sense strand does not have three 2′F modifications in a row.

[0330] If position 9 of the sense strand is a purine, then all purines in the sense strand have the 2′OMe modification. If position 9 is the only purine between positions 5 and 11 of the sense stand, then position 9 is the only position with the 2′F modification in the sense strand. If position 9 and only one other base between positions 5 and 11 of the sense strand are purines, then both of these purines are the only two positions with the 2′F modification in the sense strand. If position 9 and only two other bases between positions 5 and 11 of the sense strand are purines, and those two other purines are in adjacent positions so that there would be not three 2′F modifications in a row, then any combination of 2′F modifications can be made that give three 2′F modifications in total. If there are >2 purines between positions 5 and 11 of the sense strand, then all combinations of purines having the 2′F modification are allowed that have three to five 2′F modifications in total, provided that the sense strand does not have three 2′F modifications in a row.

[0331] In some cases, position 9 of the sense strand can be a 2′deoxy. In these cases, 2′F and 2′OMe modifications may occur at the other positions of the sense strand.

[0332] In some cases, the sense strand of any of the siRNAs of subset F comprises a modification pattern which conforms to these sense strand rules (Table 12).

[0333] In some cases, the antisense strand of any of the siRNAs of subset F comprise a modification or modification pattern. Some such examples are included in Table 12. Table 13A includes some additional sense strand modifications of the siRNAs in Table 11. The siRNAs in subset F may comprise any other modification pattern(s).

TABLE 12
Modified Screening Set

| SEQ ID NO: | Sense strand sequence (5′-3′) | SEQ ID NO: | Antisense strand sequence (5′-3′) |
|---|---|---|---|
| 4895 | guuc UfCfaaCfaCfauccuuuasusu | 4916 | usAfsaAfgGfaUfgUfgUfuGfaGfaAfcsusu |
| 4896 | uuccAfAfacAfucuacuagaasusu | 4917 | usUfscUfaGfuAfgAfuGfuUfuGfgAfasusu |
| 4897 | auagaUfgUfCfaUfacauucaasusu | 4918 | usUfsgAfaUfgUfaUfgAfcAfuCfuAfususu |
| 4898 | ugucAfuAfc Afuucauaucuasusu | 4919 | usAfsgAfuAfuGfaAfuGfuAfuGfaCfasusu |
| 4899 | aguuUfuCfAfdAcucauucggasusu | 4920 | usCfscGfaAfuGfaGfuUfgAfaAfaCfususu |
| 4900 | uucaAfcUfCfdAuucgguaucasusu | 4921 | usGfsaUfaCfcGfaAfuGfaGfuUfgAfasusu |
| 4901 | ucauUfCfggUfaUfccuuaucasusu | 4922 | usGfsaUfaAfgGfaUfaCfcGfaAfuGfasusu |
| 4902 | ucggUfaUfCfCfUfuaucaguuasusu | 4923 | usAfsaCfuGfaUfaAfgGfaUfaCfcGfasusu |
| 4903 | uuaaUfCfaaUfgCfaauaagcasusu | 4924 | usGfscUfuAfuUfgCfaUfuGfaUfuAfasusu |
| 4904 | aucaAfuGfcAfAfuaagcuugasusu | 4925 | usCfsaAfgCfuUfaUfuGfcAfuUfgAfususu |
| 4905 | ucaauGfcAfAfuAfagcuugaasusu | 4926 | usUfscAfaGfcUfuAfuUfgCfaUfuGfasusu |
| 4906 | aaugcAfAfuAfAfgcuugacgasusu | 4927 | usCfsgUfcAfaGfcUfuAfuUfgCfaUfususu |
| 4907 | auucaUfUfCfCfgUfuaccauuasusu | 4928 | usAfsaUfgGfuAfaCfgGfaAfuGfaAfususu |
| 4908 | auuacuGfuAfAfccacgaucasusu | 4929 | usGfsaUfcGfuGfgUfuAfcAfgUfaAfususu |
| 4909 | aucagUfUfgUfCfaaguaauuasusu | 4930 | usAfsaUfuAfcUfuGfaCfaAfcUfgAfususu |
| 4910 | ugucAfAfguAfAfuuguuacaasusu | 4931 | usUfsgUfaAfcAfaUfuAfcUfuGfaCfasusu |
| 4911 | uguuAfcAfuGfAfcuauguccasusu | 4932 | usGfsgAfcAfuAfgUfcAfuGfuAfaCfasusu |
| 4912 | uacaUfgaCfUfaUfguccauuasusu | 4933 | usAfsaUfgGfaCfaUfaGfuCfaUfgUfasusu |
| 4913 | cauuUfUfaaUfggguacggaasusu | 4934 | usUfscCfgUfaCfcCfaUfuAfaAfaUfgsusu |
| 4914 | aaguAfuUfUfdAucgagugcuasusu | 4935 | usAfsgCfaCfuCfgAfuAfaAfuAfcUfususu |
| 4915 | uuuaucGfaGfuGfcucaaugasusu | 4936 | usCfsaUfuGfaGfcAfcUfcGfaUfaAfasusu |

wherein Nf (Af, Cf, Gf, Tf, or Uf) is a 2′ fluoro-modified nucleoside, dN (dA, dC, dG, dT, or dU) is a 2′ deoxy-modified nucleoside, n (a, c, g, t, or u) is a 2′ O-methyl modified nucleoside, and “s” is a phosphorothioate linkage.

TABLE 13A
Alternative Modified Screening Set

| SEQ ID NO: | Sense strand sequence (5′-3′) | SEQ ID NO: | Antisense strand sequence (5′-3′) |
|---|---|---|---|
| 4937 | guucuCfaaCfaCfauccuuuasusu | 4916 | usAfsaAfgGfaUfgUfgUfuGfaGfaAfcsusu |
| 4938 | guucUfcaaCfaCfauccuuuasusu | 4916 | usAfsaAfgGfaUfgUfgUfuGfaGfaAfcsusu |
| 4939 | guucUfCfaaCfacauccuuuasusu | 4916 | usAfsaAfgGfaUfgUfgUfuGfaGfaAfcsusu |
| 4940 | guucUfCfaaCfaCfauccuuuasusu | 4916 | usAfsaAfgGfaUfgUfgUfuGfaGfaAfcsusu |
| 4941 | uuccaAfAfcAfucuacuagaasusu | 4917 | usUfscUfaGfuAfgAfuGfuUfuGfgAfasusu |
| 4942 | uuccAfaAfcAfucuacuagaasusu | 4917 | usUfscUfaGfuAfgAfuGfuUfuGfgAfasusu |
| 4943 | uuccAfAfacAfucuacuagaasusu | 4917 | usUfscUfaGfuAfgAfuGfuUfuGfgAfasusu |
| 4944 | auagaugUfCfaUfacauucaasusu | 4918 | usUfsgAfaUfgUfaUfgAfcAfuCfuAfususu |
| 4945 | auagaUfguCfaUfacauucaasusu | 4918 | usUfsgAfaUfgUfaUfgAfcAfuCfuAfususu |
| 4946 | auagaUfgUfCfauacauucaasusu | 4918 | usUfsgAfaUfgUfaUfgAfcAfuCfuAfususu |
| 4947 | auagaUfgUfCfaUfacauucaasusu | 4918 | usUfsgAfaUfgUfaUfgAfcAfuCfuAfususu |
| 4948 | aguuuucAfAfcucauucggasusu | 4920 | usCfscGfaAfuGfaGfuUfgAfaAfaCfususu |
| 4949 | uucaAfcucAfuucgguaucasusu | 4921 | usGfsaUfaCfcGfaAfuGfaGfuUfgAfasusu |
| 4950 | ucauuCfggUfaUfccuuaucasusu | 4922 | usGfsaUfaAfgGfaUfaCfcGfaAfuGfasusu |
| 4951 | ucauUfcggUfaUfccuuaucasusu | 4922 | usGfsaUfaAfgGfaUfaCfcGfaAfuGfasusu |
| 4952 | ucauUfCfggUfauccuuaucasusu | 4922 | usGfsaUfaAfgGfaUfaCfcGfaAfuGfasusu |
| 4953 | ucauUfCfggUfaUfccuuaucasusu | 4922 | usGfsaUfaAfgGfaUfaCfcGfaAfuGfasusu |
| 4954 | ucgguauCfCfuUfaucaguuasusu | 4923 | usAfsaCfuGfaUfaAfgGfaUfaCfcGfasusu |
| 4955 | ucgguauCfCfUfUfaucaguuasusu | 4923 | usAfsaCfuGfaUfaAfgGfaUfaCfcGfasusu |
| 4956 | ucgguaUfcCfuUfaucaguuasusu | 4923 | usAfsaCfuGfaUfaAfgGfaUfaCfcGfasusu |
| 4957 | ucgguaUfcCfUfuaucaguuasusu | 4923 | usAfsaCfuGfaUfaAfgGfaUfaCfcGfasusu |
| 4958 | ucgguaUfCfCfUfuaucaguuasusu | 4923 | usAfsaCfuGfaUfaAfgGfaUfaCfcGfasusu |
| 4959 | ucgguaUfCfCfUfUfaucaguuasusu | 4923 | usAfsaCfuGfaUfaAfgGfaUfaCfcGfasusu |
| 4960 | ucggUfaucCfuUfaucaguuasusu | 4923 | usAfsaCfuGfaUfaAfgGfaUfaCfcGfasusu |
| 4961 | ucggUfaucCfUfuaucaguuasusu | 4923 | usAfsaCfuGfaUfaAfgGfaUfaCfcGfasusu |
| 4962 | ucggUfauCfCfuuaucaguuasusu | 4923 | usAfsaCfuGfaUfaAfgGfaUfaCfcGfasusu |
| 4963 | ucggUfauCfCfuUfaucaguuasusu | 4923 | usAfsaCfuGfaUfaAfgGfaUfaCfcGfasusu |
| 4964 | ucggUfauCfCfUfUfaucaguuasusu | 4923 | usAfsaCfuGfaUfaAfgGfaUfaCfcGfasusu |
| 4965 | ucggUfaUfcCfuuaucaguuasusu | 4923 | usAfsaCfuGfaUfaAfgGfaUfaCfcGfasusu |
| 4966 | ucggUfaUfcCfuUfaucaguuasusu | 4923 | usAfsaCfuGfaUfaAfgGfaUfaCfcGfasusu |
| 4967 | ucggUfaUfcCfUfuaucaguuasusu | 4923 | usAfsaCfuGfaUfaAfgGfaUfaCfcGfasusu |
| 4968 | ucggUfaUfCfCfUfuaucaguuasusu | 4923 | usAfsaCfuGfaUfaAfgGfaUfaCfcGfasusu |
| 4969 | uuaauCfaaUfgCfaauaagcasusu | 4924 | usGfscUfuAfuUfgCfaUfuGfaUfuAfasusu |
| 4970 | uuaaUfcaaUfgCfaauaagcasusu | 4924 | usGfscUfuAfuUfgCfaUfuGfaUfuAfasusu |
| 4971 | uuaaUfCfaaUfgcaauaagcasusu | 4924 | usGfscUfuAfuUfgCfaUfuGfaUfuAfasusu |
| 4972 | uuaaUfCfaaUfgCfaauaagcasusu | 4924 | usGfscUfuAfuUfgCfaUfuGfaUfuAfasusu |
| 4973 | aucaauGfcAfAfuaagcuugasusu | 4925 | usCfsaAfgCfuUfaUfuGfcAfuUfgAfususu |
| 4974 | aucaAfugcAfAfuaagcuugasusu | 4925 | usCfsaAfgCfuUfaUfuGfcAfuUfgAfususu |
| 4975 | aucaAfuGfcAfauaagcuugasusu | 4925 | usCfsaAfgCfuUfaUfuGfcAfuUfgAfususu |
| 4976 | aucaAfuGfcAfAfuaagcuugasusu | 4925 | usCfsaAfgCfuUfaUfuGfcAfuUfgAfususu |
| 4977 | ucaaugcAfAfuAfagcuugaasusu | 4926 | usUfscAfaGfcUfuAfuUfgCfaUfuGfasusu |
| 4978 | ucaauGfcaAfuAfagcuugaasusu | 4926 | usUfscAfaGfcUfuAfuUfgCfaUfuGfasusu |
| 4979 | ucaauGfcAfAfuaagcuugaasusu | 4926 | usUfscAfaGfcUfuAfuUfgCfaUfuGfasusu |
| 4980 | ucaauGfcAfAfuAfagcuugaasusu | 4926 | usUfscAfaGfcUfuAfuUfgCfaUfuGfasusu |
| 4981 | aaugcaAfuAfaGfcuugacgasusu | 4927 | usCfsgUfcAfaGfcUfuAfuUfgCfaUfususu |
| 4982 | aaugcaAfuAfAfgcuugacgasusu | 4927 | usCfsgUfcAfaGfcUfuAfuUfgCfaUfususu |
| 4983 | aaugcAfauAfaGfcuugacgasusu | 4927 | usCfsgUfcAfaGfcUfuAfuUfgCfaUfususu |
| 4984 | aaugcAfauAfAfgcuugacgasusu | 4927 | usCfsgUfcAfaGfcUfuAfuUfgCfaUfususu |
| 4985 | aaugcAfAfuAfagcuugacgasusu | 4927 | usCfsgUfcAfaGfcUfuAfuUfgCfaUfususu |
| 4986 | aaugcAfAfuAfaGfcuugacgasusu | 4927 | usCfsgUfcAfaGfcUfuAfuUfgCfaUfususu |
| 4987 | aaugcAfAfuAfAfgcuugacgasusu | 4927 | usCfsgUfcAfaGfcUfuAfuUfgCfaUfususu |
| 4988 | auucauuCfCfgUfuaccauuasusu | 4928 | usAfsaUfgGfuAfaCfgGfaAfuGfaAfususu |
| 4989 | auucauUfcCfgUfuaccauuasusu | 4928 | usAfsaUfgGfuAfaCfgGfaAfuGfaAfususu |
| 4990 | auucaUfucCfgUfuaccauuasusu | 4928 | usAfsaUfgGfuAfaCfgGfaAfuGfaAfususu |
| 4991 | auucaUfuCfCfguuaccauuasusu | 4928 | usAfsaUfgGfuAfaCfgGfaAfuGfaAfususu |
| 4992 | auucaUfuCfCfgUfuaccauuasusu | 4928 | usAfsaUfgGfuAfaCfgGfaAfuGfaAfususu |
| 4993 | auucaUfUfcCfguuaccauuasusu | 4928 | usAfsaUfgGfuAfaCfgGfaAfuGfaAfususu |
| 4994 | auucaUfUfcCfgUfuaccauuasusu | 4928 | usAfsaUfgGfuAfaCfgGfaAfuGfaAfususu |
| 4995 | auucaUfUfCfCfguuaccauuasusu | 4928 | usAfsaUfgGfuAfaCfgGfaAfuGfaAfususu |
| 4996 | auucaUfUfCfCfgUfuaccauuasusu | 4928 | usAfsaUfgGfuAfaCfgGfaAfuGfaAfususu |
| 4997 | aucaguUfgUfCfaaguaauuasusu | 4930 | usAfsaUfuAfcUfuGfaCfaAfcUfgAfususu |
| 4998 | aucagUfugUfCfaaguaauuasusu | 4930 | usAfsaUfuAfcUfuGfaCfaAfcUfgAfususu |
| 4999 | aucagUfUfgUfcaaguaauuasusu | 4930 | usAfsaUfuAfcUfuGfaCfaAfcUfgAfususu |
| 5000 | aucagUfUfgUfCfaaguaauuasusu | 4930 | usAfsaUfuAfcUfuGfaCfaAfcUfgAfususu |
| 5001 | ugucaaGfuAfAfuuguuacaasusu | 4931 | usUfsgUfaAfcAfaUfuAfcUfuGfaCfasusu |
| 5002 | ugucaAfguAfAfuuguuacaasusu | 4931 | usUfsgUfaAfcAfaUfuAfcUfuGfaCfasusu |
| 5003 | ugucaAfGfuAfauuguuacaasusu | 4931 | usUfsgUfaAfcAfaUfuAfcUfuGfaCfasusu |
| 5004 | ugucaAfGfuAfAfuuguuacaasusu | 4931 | usUfsgUfaAfcAfaUfuAfcUfuGfaCfasusu |
| 5005 | ugucAfaguAfAfuuguuacaasusu | 4931 | usUfsgUfaAfcAfaUfuAfcUfuGfaCfasusu |
| 5006 | ugucAfaGfuAfauuguuacaasusu | 4931 | usUfsgUfaAfcAfaUfuAfcUfuGfaCfasusu |
| 5007 | ugucAfaGfuAfAfuuguuacaasusu | 4931 | usUfsgUfaAfcAfaUfuAfcUfuGfaCfasusu |
| 5008 | ugucAfAfguAfauuguuacaasusu | 4931 | usUfsgUfaAfcAfaUfuAfcUfuGfaCfasusu |
| 5009 | ugucAfAfguAfAfuuguuacaasusu | 4931 | usUfsgUfaAfcAfaUfuAfcUfuGfaCfasusu |
| 5010 | uguuacAfuGfAfcuauguccasusu | 4932 | usGfsgAfcAfuAfgUfcAfuGfuAfaCfasusu |
| 5011 | uguuAfcauGfAfcuauguccasusu | 4932 | usGfsgAfcAfuAfgUfcAfuGfuAfaCfasusu |
| 5012 | uguuAfcAfuGfacuauguccasusu | 4932 | usGfsgAfcAfuAfgUfcAfuGfuAfaCfasusu |
| 5013 | uguuAfcAfuGfAfcuauguccasusu | 4932 | usGfsgAfcAfuAfgUfcAfuGfuAfaCfasusu |
| 5014 | uacaugaCfUfaUfguccauuasusu | 4933 | usAfsaUfgGfaCfaUfaGfuCfaUfgUfasusu |
| 5015 | uacaUfgacUfaUfguccauuasusu | 4933 | usAfsaUfgGfaCfaUfaGfuCfaUfgUfasusu |
| 5016 | uacaUfgaCfUfauguccauuasusu | 4933 | usAfsaUfgGfaCfaUfaGfuCfaUfgUfasusu |
| 5017 | uacaUfgaCfUfaUfguccauuasusu | 4933 | usAfsaUfgGfaCfaUfaGfuCfaUfgUfasusu |
| 5018 | aaguAfuuuAfucgagugcuasusu | 4935 | usAfsgCfaCfuCfgAfuAfaAfuAfcUfususu |
| 5019 | uuuaucgAfGfuGfcucaaugasusu | 4936 | usCfsaUfuGfaGfcAfcUfcGfaUfaAfasusu |
| 5020 | uuuaucGfaGfuGfcucaaugasusu | 4936 | usCfsaUfuGfaGfcAfcUfcGfaUfaAfasusu |

wherein Nf (Af, Cf, Gf, Tf, or Uf) is a 2′ fluoro-modified nucleoside, n (a, c, g, t, or u) is a 2′ O-methyl modified nucleoside, and “s” is a phosphorothioate linkage.

[0334] Any siRNA among any of Tables 6-11 may comprise any modification pattern described herein. If a sequence has a different number of nucleotides in length than a modification pattern, the modification pattern may still be used with the appropriate number of additional nucleotides added 5′ or 3′ to match the number of nucleotides in the modification pattern. For example, if a sense or antisense strand of the siRNA among any of Tables 6-11 comprises 19 nucleotides, and a modification pattern comprises 21 nucleotides, UU may be added onto the 5′ end of the sense or antisense strand.

[0335] The siRNAs targeting human MS4A4E can be selected using criteria including cross-reactivity with a non-human primate (NHP) cynomolgus MS4A4E (e.g. accession no. ENSMFAT00000035572). Selection of siRNAs using these criteria yields Subset G. Subset G includes 16 siRNAs whose base sequences are shown in Table 13B.

TABLE 13B
Subset G siRNAs

| | Sense | | Antisense | |
|---|---|---|---|---|
| | strand | | strand | |
| | SEQ ID | Sense strand | SEQ ID | Antisense strand |
| siRNA Name | NO: | sequence (5′-3′) | NO: | sequence (5′-3′) |
| siRNA 27 | 27 | UUCCAAACAUCUACUAGAA | 2474 | UUCUAGUAGAUGUUUGGAA |
| SIRNA 272 | 272 | GUCAUACAUUCAUAUCUGU | 2719 | ACAGAUAUGAAUGUAUGAC |
| siRNA 391 | 391 | AGCAGGAAUUAGAACAACA | 2838 | UGUUGUUCUAAUUCCUGCU |
| siRNA 476 | 476 | UUAAUCAAUGCAAUAAGCU | 2923 | AGCUUAUUGCAUUGAUUAA |
| siRNA 478 | 478 | AAUCAAUGCAAUAAGCUUG | 2925 | CAAGCUUAUUGCAUUGAUU |
| siRNA 479 | 479 | AUCAAUGCAAUAAGCUUGA | 2926 | UCAAGCUUAUUGCAUUGAU |
| siRNA 480 | 480 | UCAAUGCAAUAAGCUUGAC | 2927 | GUCAAGCUUAUUGCAUUGA |
| siRNA 481 | 481 | CAAUGCAAUAAGCUUGACG | 2928 | CGUCAAGCUUAUUGCAUUG |
| SiRNA 482 | 482 | AAUGCAAUAAGCUUGACGU | 2929 | ACGUCAAGCUUAUUGCAUU |
| siRNA 484 | 484 | UGCAAUAAGCUUGACGUUU | 2931 | AAACGUCAAGCUUAUUGCA |
| siRNA 485 | 485 | GCAAUAAGCUUGACGUUUU | 2932 | AAAACGUCAAGCUUAUUGC |
| siRNA 486 | 486 | CAAUAAGCUUGACGUUUUA | 2933 | UAAAACGUCAAGCUUAUUG |
| siRNA 487 | 487 | AAUAAGCUUGACGUUUUAU | 2934 | AUAAAACGUCAAGCUUAUU |
| siRNA 488 | 488 | AUAAGCUUGACGUUUUAUU | 2935 | AAUAAAACGUCAAGCUUAU |
| SiRNA 655 | 655 | AGUGCUUUGUUGUAGCCCC | 3102 | GGGGCUACAACAAAGCACU |
| siRNA 656 | 656 | GUGCUUUGUUGUAGCCCCA | 3103 | UGGGGCUACAACAAAGCAC |

[0336] The siRNAs in subset G have the following characteristics:
[0337] Cross-reactivity: With 19mer in human MS4A4E mRNA, with 17mer or 19mer in NHP MS4A4E mRNA.
[0338] Specificity category: For predicted MS4A4E protein coding transcript isoforms, human AS2 or better and human SS3 or better. Off-target frequency: ≤20 human off-targets matched with 2 mismatches in antisense strand.
[0339] miRNA seeds: miRNA seeds: AS+SS strand: seed region not conserved in human, mouse, and rat and not present in >4 species.
[0340] SNPs: siRNA target sites do not harbor SNPs with a MAF≥1% (pos. 2-18)

### Example 3: siRNA-Mediated Knockdown of MS4A4E in TPH-1 Cell Line

[0341] Experiments will be performed, in which siRNAs will be targeted to MS4A4E mRNA to downregulate levels of MS4A4E mRNA and MS4A4E protein, leading to a decrease in TREM1 expression, when administered to the cultured human macrophage cell line TPH-1.

[0342] On Day 0, the TPH-1 cells are seeded at 150,000 cells/mL into a Falcon 24-well tissue culture plate (ThermoFisher Cat. No. 353047) at 0.5 mL per well.

[0343] On Day 1, MS4A4E siRNA and negative control siRNA master mixes are prepared. The MS4A4E siRNA master mix contains 350 μL of Opti-MEM (ThermoFisher Cat. No. 4427037-s1288 Lot No. AS02B02D) and 3.5 μL of a mixture of the two MS4A4E siRNAs (10 μM stock). The negative control siRNA master mix contains 350 μL of Opti-MEM and 3.5 μL of negative control siRNA (ThermoFisher Cat. No. 4390843, 10 μM stock). Next, 3 μL of TransIT-X2 (Mirus Cat. No. MIR-6000) is added to each master mix. The mixes are incubated for 15 minutes to allow transfection complexes to form, then 51 μL of the appropriate master mix+TransIT-X2 is added to duplicate wells of TPH-1 cells with a final siRNA concentration of 10 nM.

[0344] On Day 3, 48 hours post transfection, duplicate wells are lysed using the Cells-to-Ct kit according to the manufacturer's protocol (ThermoFisher Cat. No. 4399002) or protein lysis buffer containing protease and phosphatase inhibitors. For the Cells-to-Ct, cells are washed with 50 μL using cold 1×PBS and lysed by adding 49.5 μL of Lysis Solution and 0.5 μL DNase I per well and pipetting up and down 5 times and incubating for 5 minutes at room temperature. The Stop Solution (5 μL/well) is added to each well and mixed by pipetting up and down five times and incubating at room temperature for 2 minutes. The reverse transcriptase reaction is performed using 22.5 μL of the lysate according to the manufacturer's protocol. Samples are stored at −80° C. until real-time qPCR is performed in triplicate using TaqMan Gene Expression Assays (Applied Biosystems FAM/MS4A4E and FAM/TREM1 using a BioRad CFX96 Cat. No. 1855195). For protein quantification, equivalent quantities (30-50 g) of protein are separated by 10% SDS polyacrylamide gels and transferred to polyvinylidene fluoride membranes. Membranes are blocked with 50% nonfat milk and incubated overnight with the appropriate primary antibody at dilutions specified by the manufacturer. Next, the membranes are washed three times in TBST and incubated with the corresponding horseradish peroxidase conjugated secondary antibody at 1:5,000 dilution for 1 hr. Bound secondary antibody is detected using an enhanced chemiluminescence system. Primary immunoblotting antibodies are: anti-GAPDH, anti-TREM1, and anti-MS4A4E (Abcam, Cambridge, UK).

[0345] A decrease in MS4A4E mRNA expression in the TPH-1 cells is expected after transfection with the MS4A4E siRNAs compared to MS4A4E mRNA levels in TPH-1 cells transfected with the non-specific control siRNA 48 hours after transfection. There is an expected decrease in the amount of TREM1 mRNA and protein, measured by quantifying the amount of TREM1 RNA and protein in wells containing TPH-1 cells transfected with the MS4A4E siRNAs relative to the amount of TREM1 RNA and protein in wells containing TPH-1 cells transfected with a non-specific control siRNA 48 hours after transfection. These results are expected to show that the MS4A4E siRNAs elicit knockdown of MS4A4E mRNA in TPH-1 cells and that the decrease in MS4A4E expression corresponds with a decrease in TREM1 RNA and protein.

### Example 4: ASO-Mediated Knockdown of MS4A4E in TPH-1 Cell Line

[0346] Experiments will be performed, in which ASOs will be targeted to MS4A4E mRNA to downregulate levels of MS4A4E mRNA and MS4A4E protein, leading to a decrease in TREM1 expression, when administered to the cultured human macrophage cell line TPH-1.

[0347] On Day 0, the TPH-1 cells are seeded at 150,000 cells/mL into a Falcon 24-well tissue culture plate (ThermoFisher Cat. No. 353047) at 0.5 mL per well.

[0348] On Day 1, MS4A4E ASO and negative control ASO master mixes are prepared. The MS4A4E ASO master mix contains 350 μL of Opti-MEM (ThermoFisher Cat. No. 4427037-s1288 Lot No. AS02B02D) and 3.5 μL of a mixture of the two MS4A4E ASOs (10 μM stock). The negative control ASO master mix contains 350 μL of Opti-MEM and 3.5 μL of a negative control ASO (10 μM stock). Next, 3 μL of TransIT-X2 (Mirus Cat. No. MIR-6000) is added to each master mix. The mixes are incubated for 15 minutes to allow transfection complexes to form, then 51 μL of the appropriate master mix+TransIT-X2 is added to duplicate wells of TPH-1 cells with a final ASO concentration of 10 nM.

[0349] On Day 3, 48 hours post transfection, duplicate wells are lysed using the Cells-to-Ct kit according to the manufacturer's protocol (ThermoFisher Cat. No. 4399002) or protein lysis buffer containing protease and phosphatase inhibitors. For the Cells-to-Ct, cells are washed with 50 μL using cold 1×PBS and lysed by adding 49.5 μL of Lysis Solution and 0.5 μL DNase I per well and pipetting up and down 5 times and incubating for 5 minutes at room temperature. The Stop Solution (5 μL/well) is added to each well and mixed by pipetting up and down five times and incubating at room temperature for 2 minutes. The reverse transcriptase reaction is performed using 22.5 μL of the lysate according to the manufacturer's protocol. Samples are stored at −80° C. until real-time qPCR is performed in triplicate using TaqMan Gene Expression Assays (Applied Biosystems FAM/MS4A4E and FAM/TREM1 using a BioRad CFX96 Cat. No. 1855195). For protein quantification, equivalent quantities (30-50 g) of protein are separated by 10% SDS polyacrylamide gels and transferred to polyvinylidene fluoride membranes. Membranes are blocked with 50% nonfat milk and incubated overnight with the appropriate primary antibody at dilutions specified by the manufacturer. Next, the membranes are washed three times in TBST and incubated with the corresponding horseradish peroxidase conjugated secondary antibody at 1:5,000 dilution for 1 hr. Bound secondary antibody is detected using an enhanced chemiluminescence system. Primary immunoblotting antibodies are: anti-GAPDH, anti-TREM1, and anti-MS4A4E (Abcam, Cambridge, UK).

[0350] A decrease in MS4A4E mRNA expression in the TPH-1 cells is expected after transfection with the MS4A4E ASOs compared to MS4A4E mRNA levels in TPH-1 cells transfected with the non-specific control ASO 48 hours after transfection. There is an expected decrease in the amount of TREM1 mRNA and protein, measured by quantifying the amount of TREM1 RNA and protein in wells containing TPH-1 cells transfected with the MS4A4E ASOs relative to the amount of TREM1 RNA and protein in wells containing TPH-1 cells transfected with a non-specific control ASO 48 hours after transfection. These results are expected to show that the MS4A4E ASOs elicit knockdown of MS4A4E mRNA in TPH-1 cells and that the decrease in MS4A4E expression corresponds with a decrease in TREM1 RNA and protein.

### Example 5: Inhibition of MS4A4E in a Mouse Model for NASH/NAFLD Using MS4A4E siRNAs or ASOs

[0351] An experiment will be performed using a mouse model of NASH/NAFLD to evaluate the effect of siRNA or ASO inhibition of MS4A4E. C₅₇BL/6NTac mice (Taconic Cat. No. DIO-B6-M) are fed a high fructose, high fat, high cholesterol diet for 12 weeks to produce diet induce obesity (DIO) prior to treatment. Liver and metabolic function is monitored by measuring fasted blood glucose, ALT, and lipids such as triglycerides and cholesterol.

[0352] Mice are divided into five groups: Group 1—treated with a non-targeting control siRNA, Group 2—treated with a non-targeting control ASO, Group 3—treated with a MS4A4E siRNA, Group 4—treated with a MS4A4E ASO, Group 5—treated with vehicle. Each group includes eight male mice.

[0353] Administration of the siRNA and ASO is achieved with a 200 μL subcutaneous injection of naked siRNA or ASO resuspended in PBS at a concentration of 10 μM. On Study Day 0, Group 1 mice are injected subcutaneously with the non-targeting control siRNA, Group 2 mice are injected subcutaneously with the non-targeting control ASO, Group 3 mice are injected subcutaneously with the siRNA targeting mouse MS4A4E, Group 4 mice are injected subcutaneously with the ASO targeting mouse MS4A4E, and Group 5 mice are injected subcutaneously with vehicle (PBS). Seven days after the first injection, animals from each group will be dosed again for a total of 2 injections. Fasted blood samples are taken twice per week, and blood glucose, ALT, and lipids are measured.

[0354] Six weeks after the treatment, mice are sacrificed by cervical dislocation following an intraperitoneal injection of 0.3 ml Nembutal (5 mg/ml) (Sigma Cat. No. 1507002). Final blood samples are collected, livers are removed, and liver sections are placed in RNAlater for mRNA isolation or neutral buffered formalin for histopathology.

[0355] mRNA is isolated from tissue placed in RNAlater solution using the PureLink kit according to the manufacturer's protocol (ThermoFisher Cat. No. 12183020). Reverse transcription is performed according to a manufacturer's protocol. Samples are stored at −80° C. until real-time qPCR is performed in triplicate using TaqMan Gene Expression Assays (Applied Biosystems FAM/MS4A4E using a BioRad CFX96 Cat. No. 1855195). A decrease in MS4A4E mRNA expression in the liver tissue from mice dosed with the MS4A4E siRNA or ASO is expected compared to MS4A4E mRNA levels in the liver tissue from mice dosed with the non-specific controls. There is an expected decrease in non-fasted blood glucose, ALT, and lipids in mice that receive the MS4A4E siRNA or ASO compared to the non-fasted blood glucose, ALT, and lipids in mice that receive the non-specific control. These results are expected to show that the MS4A4E siRNA and ASO elicit knockdown of MS4A4E mRNA in liver tissue and that the decrease in MS4A4E expression corresponds with a decrease in non-fasted blood glucose, ALT, and lipids.

[0356] Additionally, liver sections placed in the neutral buffered formalin are embedded into paraffin and sectioned onto slides. Slides from both treated and non-treated mice are then assessed for histopathology using a semi-quantitative scoring system (H&E/Picrosirius Red). There is an expected decrease in histopathology-derived fatty liver and fibrosis scores in mice that receive the MS4A4E siRNA or ASO compared to the histopathology-derived fatty liver and fibrosis scores in mice that receive the non-specific control. These results are expected to show that the MS4A4E siRNA or ASO elicit knockdown of MS4A4E mRNA in liver tissue and that the decrease in MS4A4E expression is correlated with a decrease in histopathology fatty liver and fibrosis scoring. Thus, siRNAs or ASOs targeting MS4A4E may be used to treat NASH or NAFLD.

### Example 6: Oligonucleotide Synthesis

[0357] Oligonucleotides such as siRNAs may be synthesized according to phosphoramidite technology on a solid phase. For example, a K&A oligonucleotide synthesizer may be used. Syntheses may be performed on a solid support made of controlled pore glass (CPG, 500 Å or 600 Å, obtained from AM Chemicals, Oceanside, CA, USA). All 2′-OMe and 2′-F phosphoramidites may be purchased from Hongene Biotech (Union City, CA, USA). All phosphoramidites may be dissolved in anhydrous acetonitrile (100 mM) and molecular sieves (3 Å) may be added. 5-Benzylthio-1H-tetrazole (BTT, 250 mM in acetonitrile) or 5-Ethylthio-1H-tetrazole (ETT, 250 mM in acetonitrile) may be used as activator solution. Coupling times may be 9-18 min (e.g. with a GalNAc such as ETL17), 6 min (e.g. with 2′OMe and 2′F). In order to introduce phosphorothioate linkages, a 100 mM solution of 3-phenyl 1,2,4-dithiazoline-5-one (POS, obtained from PolyOrg, Inc., Leominster, Mass., USA) in anhydrous acetonitrile may be employed.

[0358] After solid phase synthesis, the dried solid support may be treated with a 1:1 volume solution of 40 wt. % methylamine in water and 28% ammonium hydroxide solution (Aldrich) for two hours at 30° C. The solution may be evaporated and the solid residue may be reconstituted in water and purified by anionic exchange HPLC using a TKSgel SuperQ-5PW 13u column Buffer A may be 20 mM Tris. 5 mM EDTA, pH 9.0 and contained 20% Acetonitrile and buffer B may be the same as buffer A with the addition of 1 M sodium chloride. UV traces at 260 nm may be recorded. Appropriate fractions may be pooled then desalted using Sephadex G-25 medium.

[0359] Equimolar amounts of sense and antisense strand may be combined to prepare a duplex. The duplex solution may be prepared in 0.1×PBS (Phosphate-Buffered Saline. 1×, Gibco). The duplex solution may be annealed at 95° C. for 5 ruin, and cooled to room temperature slowly. Duplex concentration may be determined by measuring the solution absorbance on a UV-Vis spectrometer at 260 nm in 0.1×PBS. For some experiments, a conversion factor may be calculated from an experimentally determined extinction coefficient.

### Example 7: GalNAc Ligands for Hepatocyte Targeting of Oligonucleotides

[0360] Without limiting the disclosure to these individual methods, there are at least two general methods for attachment of multivalent N-acetylgalactosamine (GalNAc) ligands to oligonucleotides: solid or solution-phase conjugations. GalNAc ligands may be attached to solid phase resin for 3′ conjugation or at the 5′ terminus using GalNAc phosphoramidite reagents. GalNAc phosphoramidites may be coupled on solid phase as for other nucleosides in the oligonucleotide sequence at any position in the sequence. A non-limiting example of a phosphoramidite reagent for GalNAc conjugation to a 5′ end oligonucleotide is shown in Table 14.

TABLE 14
GalNAc Conjugation Reagent

| Type of | |
|---|---|
| conjugation | Structure |
| Solid phase 3′ attachment where squiggly line is rest of oligonucleotide chain and right- most OH is where attachment′ to solid phase is. | [chemical structure] |
| | This GalNAc ligand may be referred to as ″GalNAc23″ or ″GalNAc#23.″ |
| Solid phase 5′ attachment phosphoramidite | [chemical structure] |
| Solid phase 5′ attachment Phosphoramidite | [chemical structure] |
| Solution phase Carboxylic acid for amide coupling anywhere on oligonucleotide | [chemical structure] |
| | Where Ac is an acetyl group or other hydroxyl protecting group that can be |
| | removed under basic, acid or reducing conditions. |

[0361] In solution phase conjugation, the oligonucleotide sequence—including a reactive conjugation site—is formed on the resin. The oligonucleotide is then removed from the resin and GalNAc is conjugated to the reactive site.

[0362] The carboxy GalNAc derivatives may be coupled to amino-modified oligonucleotides. The peptide coupling conditions are known to the skilled in the art using a carbodiimide coupling agent like DCC (N,N′-Dicyclohexylcarbodiimide), EDC (N-(3-dimethylaminopropyl)-N′-ethylcarbodlimide) or EDC.HCl (N-(3-dimethylaminopropyl)-N′-ethylcarbodiimide hydrochloride and an additive like HOBt (1-hydroxybenztriazole), HOSu (N-hydroxysuccinimide), TBTU (N,N,N′,N′-Tetramethyl-O-(benzotriazol-1-yl)uronium tetrafluoroborate, HBTU (2-(1H-benzotriazol-1-yl)-1,1,3,3-tetramethyluronium hexafluorophosphate) or HOAt (1-Hydroxy-7-azabenzotriazole and common combinations thereof such as TBTU/HOBt or HBTU/HOAt to form activated amine-reactive esters.

[0363] Amine groups may be incorporated into oligonucleotides using a number of known, commercially available reagents at the 5′ terminus, 3′ terminus or anywhere in between.

[0364] Non-limiting examples of reagents for oligonucleotide synthesis to incorporate an amino group include:
[0365] 5′ attachment:
[0366] 6-(4-Monomethoxytritylamino)hexyl-(2-cyanoethyl)-(N,N-diisopropyl)-phosphoramidite CAS Number: 114616-27-2
[0367] 5′-Amino-Modifier TEG CE-Phosphoramidite
[0368] 10-(O-trifluoroacetamido-N-ethyl)-triethyleneglycol-1-[(2-cyanoethyl)-(N,N-diisopropyl)]-phosphoramidite
[0369] 3′ attachment:
[0370] 3′-Amino-Modifier Serinol CPG
[0371] 3-Dimethoxytrityloxy-2-(3-(fluorenylmethoxycarbonylamino)propanamido)propyl-1-O-succinyl-long chain alkylamino-CPG (where CPG stands for controlled-pore glass and is the solid support)
[0372] Amino-Modifier Serinol Phosphoramidite
[0373] 3-Dimethoxytrityloxy-2-(3-(fluorenylmethoxycarbonylamino)propanamido)propyl-1-O-(2-cyanoethyl)-(N,N-diisopropyl)-phosphoramidite

[0374] Internal (base modified):
[0375] Amino-Modifier C6 dT
[0376] 5′-Dimethoxytrityl-5-[N-(trifluoroacetylaminohexyl)-3-acrylimido]-2′-deoxyUridine,3′-[(2-cyanoethyl)-(N,N-diisopropyl)]-phosphoramidite. CAS Number: 178925-21-8

[0377] Solution phase conjugations may occur after oligonucleotide synthesis via reactions between non-nucleosidic nucleophilic functional groups that are attached to the oligonucleotide and electrophilic GalNAc reagents. Examples of nucleophilic groups include amines and thiols, and examples of electrophilic reagents include activated esters (e.g. N-hydroxysuccinimide, pentafluorophenyl) and maleimides.

### Example 8: Synthesis of GalNAc Ligands

[0378] Without limiting the disclosure to these individual methods, there are at least two general methods for attachment of multivalent N-acetylgalactosamine (GalNAc) ligands to oligonucleotides: solid or solution-phase conjugations. GalNAc ligands may be attached to solid phase resin for 3′ conjugation or at the 5′ terminus using GalNAc phosphoramidite reagents. GalNAc phosphoramidites may be coupled on solid phase as for other nucleosides in the oligonucleotide sequence at any position in the sequence. A non-limiting example of a phosphoramidite reagent for GalNAc conjugation to a 5′ end oligonucleotide is shown in Table 15.

TABLE 15
GalNAc Conjugation Reagent

| Type of | |
|---|---|
| conjugation | Structure |
| Solid phase 5′ attachment phosphoramidite | [chemical structure] |

[0379] The following includes examples of synthesis reactions used to create a GalNAc moiety:

Scheme for the preparation of NAcegal-Linker-TMSOTf

[chemical structure]

### General Procedure for Preparation of Compound 2A

[chemical structure]

[0380] To a solution of Compound 1A (500 g, 4.76 mol, 476 mL) in 2-Methly-THF (2.00 L) is added CbzCl (406 g, 2.38 mol, 338 mL) in 2-Methyl-THF (750 mL) dropwise at 0° C. The mixture is stirred at 25° C. for 2 hrs under N₂ atmosphere. TLC (DCM:MeOH=20:1, PMA) may indicate CbzCl is consumed completely and one new spot (R_{f}=0.43) formed. The reaction mixture is added HCl/EtOAc (1 N, 180 mL) and stirred for 30 mins, white solid is removed by filtration through celite, the filtrate is concentrated under vacuum to give Compound 2A (540 g, 2.26 mol, 47.5% yield) as a pale yellow oil and used into the next step without further purification. ¹H NMR: δ 7.28-7.41 (m, 5H), 5.55 (br s, 1H), 5.01-5.22 (m, 2H), 3.63-3.80 (m, 2H), 3.46-3.59 (m, 4H), 3.29-3.44 (m, 2H), 2.83-3.02 (m, 1H).

### General Procedure for Preparation of Compound 4A

[chemical structure]

[0381] To a solution of Compound 3A (1.00 kg, 4.64 mol, HCl) in pyridine (5.00 L) is added acetyl acetate (4.73 kg, 46.4 mol, 4.34 L) dropwise at 0° C. under N₂ atmosphere. The mixture is stirred at 25° C. for 16 hrs under N₂ atmosphere. TLC (DCM:MeOH=20:1, PMA) indicated Compound 3A is consumed completely and two new spots (R_{f}=0.35) formed. The reaction mixture is added to cold water (30.0 L) and stirred at 0° C. for 0.5 hr, white solid formed, filtered and dried to give Compound 4A (1.55 kg, 3.98 mol, 85.8% yield) as a white solid and used in the next step without further purification. ¹H NMR: δ 7.90 (d, J=9.29 Hz, 1H), 5.64 (d, J=8.78 Hz, 1H), 5.26 (d, J=3.01 Hz, 1H), 5.06 (dd, J=11.29, 3.26 Hz, 1H), 4.22 (t, J=6.15 Hz, 1H), 3.95-4.16 (m, 3H), 2.12 (s, 3H), 2.03 (s, 3H), 1.99 (s, 3H), 1.90 (s, 3H), 1.78 (s, 3H).

### General Procedure for Preparation of Compound 5A

[chemical structure]

[0382] To a solution of Compound 4A (300 g, 771 mmol) in DCE (1.50 L) is added TMSOTf (257 g, 1.16 mol, 209 mL) and stirred for 2 hrs at 60° C., and then stirred for 1 hr at 25° C. Compound 2A (203 g, 848 mmol) is dissolved in DCE (1.50 L) and added 4 Å powder molecular sieves (150 g) stirring for 30 mins under N₂ atmosphere. Then the solution of Compound 4A in DCE is added dropwise to the mixture at 0° C. The mixture is stirred at 25° C. for 16 hrs under N₂ atmosphere. TLC (DCM:MeOH=25:1, PMA) indicated Compound 4A is consumed completely and new spot (R_{f}=0.24) formed. The reaction mixture is filtered and washed with sat. NaHCO₃ (2.00 L), water (2.00 L) and sat. brine (2.00 L). The organic layer is dried over anhydrous Na₂SO₄, filtered and concentrated under reduced pressure to give a residue. The residue is triturated with 2-Me-THE/heptane (5/3, v/v, 1.80 L) for 2 hrs, filtered and dried to give Compound 5A (225 g, 389 mmol, 50.3% yield, 98.4% purity) as a white solid. ¹H NMR: δ 7.81 (d, J 9.29 Hz, 1H), 7.20-7.42 (m, 6H), 5.21 (d, J=3.26 Hz, 1H), 4.92-5.05 (m, 3H), 4.55 (d, J=8.28 Hz, 1H), 3.98-4.07 (m, 3H), 3.82-3.93 (m, 1H), 3.71-3.81 (m, 1H), 3.55-3.62 (m, 1H), 3.43-3.53 (m, 2H), 3.37-3.43 (m, 2H), 3.14 (q, J=5.77 Hz, 2H), 2.10 (s, 3H), 1.99 (s, 3H), 1.89 (s, 3H), 1.77 (s, 3H).

### General Procedure for Preparation of NAcegal-Linker-Tosylate Salt

[chemical structure]

[0383] To a solution of Compound 5A (200 g, 352 mmol) in THF (1.0 L) is added dry Pd/C (15.0 g, 10% purity) and TsOH (60.6 g, 352 mmol) under N₂ atmosphere. The suspension is degassed under vacuum and purged with H₂ several times. The mixture is stirred at 25° C. for 3 hrs under H₂ (45 psi) atmosphere. TLC (DCM:MeOH=10:1, PMA) indicated Compound 5A is consumed completely and one new spot (R_{f}=0.04) is formed. The reaction mixture is filtered and concentrated (≤40° C.) under reduced pressure to give a residue. Diluted with anhydrous DCM (500 mL, dried overnight with 4 Å molecular sieves (dried at 300° C. for 12 hrs)) and concentrate to give a residue and run Karl Fisher (KF) to check for water content. This is repeated 3 times with anhydrous DCM (500 mL) dilutions and concentration to give NAcegal-Linker-TMSOTf (205 g, 95.8% yield, TsOH salt) as a foamy white solid. ¹H NMR: δ 7.91 (d, J=9.03 Hz, 1H), 7.53-7.86 (m, 2H), 7.49 (d, J=8.03 Hz, 2H), 7.13 (d, J=8.03 Hz, 2H), 5.22 (d, J=3.26 Hz, 1H), 4.98 (dd, J=11.29, 3.26 Hz, 1H), 4.57 (d, J=8.53 Hz, 1H), 3.99-4.05 (m, 3H), 3.87-3.94 (m, 1H), 3.79-3.85 (m, 1H), 3.51-3.62 (m, 5H), 2.96 (br t, J=5.14 Hz, 2H), 2.29 (s, 3H), 2.10 (s, 3H), 2.00 (s, 3H), 1.89 (s, 3H), 1.78 (s, 3H).

### Scheme for the Preparation of TRIS-PEG2-CBZ

[chemical structure]

[chemical structure]

### General Procedure for Preparation of Compound 5B

[chemical structure]

[0384] To a solution of Compound 4B (400 g, 1.67 mol, 1.00 eq) and NaOH (10 M, 16.7 mL, 0.10 eq) in THE (2.00 L) is added Compound 4B_2 (1.07 kg, 8.36 mol, 1.20 L, 5.00 eq), the mixture is stirred at 30° C. for 2 hrs. LCMS showed the desired MS is given. Five batches of solution are combined to one batch, then the mixture is diluted with water (6.00 L), extracted with ethyl acetate (3.00 L*3), the combined organic layer is washed with brine (3.00 L), dried over Na₂SO₄, filtered and concentrated under vacuum. The crude is purified by column chromatography (SiO₂, petroleum ether:ethyl acetate=100:1-10:1, R_{f}=0.5) to give Compound 5B (2.36 kg, 6.43 mol, 76.9% yield) as light yellow oil. HNMR: δ 7.31-7.36 (m, 5H), 5.38 (s, 1H), 5.11-5.16 (m, 2H), 3.75 (t, J=6.4 Hz), 3.54-3.62 (m, 6H), 3.39 (d, J=5.2 Hz), 2.61 (t, J=6.0 Hz).

### General Procedure for Preparation of 3-oxo-1-phenyl-2,7,10-trioxa-4-azatridecan-13-oic Acid (Compound 2B Below)

[chemical structure]

[0385] To a solution of Compound 5B (741 g, 2.02 mol, 1.00 eq) in DCM (2.80 L) is added TFA (1.43 kg, 12.5 mol, 928 mL, 6.22 eq), the mixture is stirred at 25° C. for 3 hrs. LCMS showed the desired MS is given. The mixture is diluted with DCM (5.00 L), washed with water (3.00 L*3), brine (2.00 L), the combined organic layer is dried over Na₂SO₄, filtered and concentrated under vacuum to give Compound 2B (1800 g, crude) as light yellow oil. HNMR: δ 9.46 (s, 5H), 7.27-7.34 (m, 5H), 6.50-6.65 (m, 1H), 5.71 (s, 1H), 5.10-5.15 (m, 2H), 3.68-3.70 (m, 14H), 3.58-3.61 (m, 6H), 3.39 (s, 2H), 2.55 (s, 6H), 2.44 (s, 2H).

### General Procedure for Preparation of Compound 3B

[chemical structure]

[0386] To a solution of Compound 2B (375 g, 999 mmol, 83.0% purity, 1.00 eq) in DCM (1.80 L) is added HATU (570 g, 1.50 mol, 1.50 eq) and DIEA (258 g, 2.00 mol, 348 mL, 2.00 eq) at 0° C., the mixture is stirred at 0° C. for 30 min, then Compound 1B (606 g, 1.20 mol, 1.20 eq) is added, the mixture is stirred at 25° C. for 1 hr. LCMS showed desired MS is given. The mixture is combined to one batch, then the mixture is diluted with DCM (5.00 L), washed with 1 N HCl aqueous solution (2.00 L*2), then the organic layer is washed with saturated Na₂CO₃ aqueous solution (2.00 L*2) and brine (2.00 L), the organic layer is dried over Na₂SO₄, filtered and concentrated under vacuum to give Compound 3B (3.88 kg, crude) as yellow oil.

### General Procedure for Preparation of TRIS-PEG2-CBZ

[chemical structure]

[0387] A solution of Compound 3B (775 g, 487 mmol, 50.3% purity, 1.00 eq) in HCl/dioxane (4 M, 2.91 L, 23.8 eq) is stirred at 25° C. for 2 hrs. LCMS showed the desired MS is given. The mixture is concentrated under vacuum to give a residue. Then the combined residue is diluted with DCM (5.00 L), adjusted to pH=8 with 2.5 M NaOH aqueous solution, and separated. The aqueous phase is extracted with DCM (3.00 L) again, then the aqueous solution is adjusted to pH=3 with 1 N HCl aqueous solution, then extracted with DCM (5.00 L*2), the combined organic layer is washed with brine (3.00 L), dried over Na₂SO₄, filtered and concentrated under vacuum. The crude is purified by column chromatography (SiO₂, DCM:MeOH=0:1-12:1, 0.1% HOAc, R_{f}=0.4). The residue is diluted with DCM (5.00 L), adjusted to pH=8 with 2.5 M NaOH aqueous solution, separated, the aqueous solution is extracted with DCM (3.00 L) again, then the aqueous solution is adjusted to pH=3 with 6 N HCl aqueous solution, extracted with DCM:MeOH=10:1 (5.00 L*2), the combined organic layer is washed with brine (2.00 L), dried over Na₂SO₄, filtered and concentrated under vacuum to give a residue. Then the residue is diluted with MeCN (5.00 L), concentrated under vacuum, repeat this procedure twice to remove water to give TRIS-PEG2-CBZ (1.25 kg, 1.91 mol, 78.1% yield, 95.8% purity) as light yellow oil. ¹HNMR: 400 MHz, MeOD, δ 7.30-7.35 (5H), 5.07 (s, 2H), 3.65-3.70 (m, 16H), 3.59 (s, 4H), 3.45 (t, J=5.6 Hz), 2.51 (t, J=6.0 Hz), 2.43 (t, 6.4 Hz).

### Scheme for the Preparation of TriNGal-TRIS-Peg2-Phosph 8c

[chemical structure]

[chemical structure]

[chemical structure]

[chemical structure]

### TriGNal-TRIS-Peg2-Phosph 8c

### General Procedure for Preparation of Compound 3C

[chemical structure]

[0388] To a solution of Compound 1C (155 g, 245 mmol, 1.00 eq) in ACN (1500 mL) is added TBTU (260 g, 811 mmol, 3.30 eq), DIEA (209 g, 1.62 mol, 282 mL, 6.60 eq) and Compound 2C (492 g, 811 mmol, 3.30 eq, TsOH) at 0° C., the mixture is stirred at 15° C. for 16 hrs. LCMS showed the desired MS is given. The mixture is concentrated under vacuum to give a residue, then the mixture is diluted with DCM (2000 mL), washed with 1 N HCl aqueous solution (700 mL*2), then saturated NaHCO₃ aqueous solution (700 mL*2) and concentrated under vacuum. The crude is purified by column chromatography to give Compound 3C (304 g, 155 mmol, 63.1% yield, 96.0% purity) as a yellow solid.

### General Procedure for Preparation of Compound 4C

[chemical structure]

[0389] Two batches solution of Compound 3C (55.0 g, 29.2 mmol, 1.00 eq) in MeOH (1600 mL) is added Pd/C (6.60 g, 19.1 mmol, 10.0% purity) and TFA (3.34 g, 29.2 mmol, 2.17 mL, 1.00 eq), the mixture is degassed under vacuum and purged with H₂. The mixture is stirred under H₂ (15 psi) at 15° C. for 2 hours. LCMS showed the desired MS is given. The mixture is filtered and the filtrate is concentrated under vacuum to give Compound 4C (106 g, 54.8 mmol, 93.7% yield, 96.2% purity, TFA) as a white solid.

### General Procedure for Preparation of Compound 5C

[chemical structure]

[0390] Two batches in parallel. To a solution of EDCI (28.8 g, 150 mmol, 1.00 eq) in DCM (125 mL) is added compound 4a (25.0 g, 150 mmol, 1.00 eq) dropwise at 0° C., then the mixture is added to compound 4 (25.0 g, 150 mmol, 1.00 eq) in DCM (125 mL) at 0° C., then the mixture is stirred at 25° C. for 1 hr. TLC (Petroleum ether:Ethyl acetate=3:1, R_{f}=0.45) showed the reactant is consumed and one new spot is formed. The reaction mixture is diluted with DCM (100 mL) then washed with aq.NaHCO₃ (250 mL*1) and brine (250 mL), dried over Na₂SO₄, filtered and concentrated under reduced pressure to give a residue. The residue is purified by column chromatography (SiO₂, Petroleum ether:Ethyl acetate=100:1 to 3:1), TLC (SiO₂, Petroleum ether:Ethyl acetate=3:1), R_{f}=0.45, then concentrated under reduced pressure to give a residue. Compound 5C (57.0 g, 176 mmol, 58.4% yield, 96.9% purity) is obtained as colorless oil and confirmed ¹HNMR: EW33072-2-P1A, 400 MHz, DMSO δ 9.21 (s, 1H), 7.07-7.09 (m, 2H), 6.67-6.70 (m, 2H), 3.02-3.04 (m, 2H), 2.86-2.90 (m, 2H)

### General Procedure for Preparation of Compound 6

[chemical structure]

[0391] To a mixture of compound 3 (79.0 g, 41.0 mmol, 96.400 purity, 1.00 eq, TFA) and compound 6C (14.2 g, 43.8 mmol, 96.9% purity, 1.07 eq) in DCM (800 mL) is added TEA (16.6 g, 164 mmol, 22.8 mL, 4.00 eq) dropwise at 0° C., the mixture is stirred at 15° C. for 16 hrs. LCMS (EW33072-12-P1B, Rt=0.844 min) showed the desired mass is detected. The reaction mixture is diluted with DCM (400 mL) and washed with aq.NaHCO₃ (400 mL*1) and brine (400 mL*1), then the mixture is diluted with DCM (2.00 L) and washed with 0.7 M Na₂CO₃ (1000 mL*3) and brine (800 mL*3), dried over Na₂SO₄, filtered and concentrated under reduced pressure to give a residue. The residue is used to next step directly without purification. Compound 6 (80.0 g, crude) is obtained as white solid and confirmed via ¹HNMR: EW33072-12-P1A, 400 MHz, MeOD δ 7.02-7.04 (m, 2H), 6.68-6.70 (m, 2H), 5.34-5.35 (s, 3H), 5.07-5.08 (d, J=4.00 Hz, 3H), 4.62-4.64 (d, J=8.00 Hz, 3H), 3.71-4.16 (m, 16H), 3.31-3.70 (m, 44H), 2.80-2.83 (m, 2H), 2.68 (m, 2H), 2.46-2.47 (m, 10H), 2.14 (s, 9H), 2.03 (s, 9H), 1.94-1.95 (d, J=4.00 Hz, 18H).

### General Procedure for Preparation of TriGNal-TRIS-Peg2-Phosph 8c

[chemical structure]

[0392] Two batches are synthesized in parallel. To a solution of compound 6C (40.0 g, 21.1 mmol, 1.00 eq in DCM (600 mL) is added diisopropylammonium tetrazolide (3.62 g, 21.1 mmol, 1.00 eq) and compound 7c (6.37 g, 21.1 mmol, 6.71 mL, 1.00 eq) in DCM (8.00 mL) drop-wise, the mixture is stirred at 30° C. for 1 hr, then added compound 7c (3.18 g, 10.6 mmol, 3.35 mL, 0.50 eq) in DCM (8.00 mL) drop-wise, the mixture is stirred at 30° C. for 30 mins, then added compound 7c (3.18 g, 10.6 mmol, 3.35 mL, 0.50 eq) in DCM (8.00 mL) drop-wise, the mixture is stirred at 30° C. for 1.5 hrs. LCMS (EW33072-17-P1C1, Rt=0.921 min) showed the desired MS+1 is detected. LCMS (EW33072-17-P1C2, Rt=0.919 min) showed the desired MS+1 is detected. Two batches are combined for work-up. The mixture is diluted with DCM (1.20 L), washed with saturated NaHCO₃ aqueous solution (1.60 L*2), 3% DMF in H₂O (1.60 L*2), H₂O (1.60 L*3), brine (1.60 L), dried over Na₂SO₄, filtered and concentrated under reduced pressure to give a residue. The residue is purified by column chromatography (SiO₂, DCM:MeOH:TEA=100:3:2) TLC (SiO₂, DCM:MeOH=10:1, R_{f}=0.45), then concentrated under reduced pressure to give a residue. Compound 8C (76.0 g, 34.8 mmol, 82.5% yield, 96.0% purity) is obtained as white solid and confirmed via ¹HNMR: EW33072-19-P1C, 400 MHz, MeOD δ 7.13-7.15 (d, J=8.50 Hz, 2H), 6.95-6.97 (dd, J=8.38, 1.13 Hz, 2H), 5.34 (d, J=2.88 Hz, 3H), 0.09 (dd, J=11.26, 3.38 Hz, 3H), 4.64 (d, J=8.50 Hz, 3H), 3.99-4.20 (m, 12H), 3.88-3.98 (m, 5H), 3.66-3.83 (m, 20H), 3.51-3.65 (m, 17H), 3.33-3.50 (m, 9H), 2.87 (t, J=7.63 Hz, 2H), 2.76 (t, J=5.94 Hz, 2H), 2.42-2.50 (m, 10H), 2.14 (s, 9H), 2.03 (s, 9H), 1.94-1.95 (d, J=6.13 Hz, 18H), 1.24-1.26 (d, J=6.75 Hz, 6H), 1.18-1.20 (d, J=6.75 Hz, 6H)

### Example 9: Modification Motif 1

[0393] An example MS4A4E siRNA includes a combination of the following modifications:
[0394] Position 9 (from 5′ to 3′) of the sense strand is 2′ F.
[0395] If position 9 is a pyrimidine then all purines in the Sense Strand are 2′OMe, and 1-5 pyrimidines between positions 5 and 11 are 2′ F provided that there are never three 2′F modifications in a row.
[0396] If position 9 is a purine then all pyrimidines in the Sense Strand are 2′OMe, and 1-5 purines between positions 5 and 11 are 2′ F provided that there are never three 2′F modifications in a row.
[0397] Antisense strand odd-numbered positions are 2′OMe and even-numbered positions are a mixture of 2′ F, 2′OMe and 2′ deoxy.

### Example 10: Modification Motif 2

[0398] An example MS4A4E siRNA includes a combination of the following modifications:
[0399] Position 9 (from 5′ to 3′) of the sense strand is 2′ deoxy.
[0400] Sense strand positions 5, 7 and 8 are 2′ F.
[0401] All pyrimidines in positions 10-21 are 2′ OMe, and purines are a mixture of 2′ OMe and 2′ F. Alternatively, all purines in positions 10-21 are 2′ OMe and all pyrimidines in positions 10-21 are a mixture of 2′ OMe and 2′ F.
[0402] Antisense strand odd-numbered positions are 2′OMe and even-numbered positions are a mixture of 2′ F, 2′OMe and 2′ deoxy.

### Example 11: Screening of siRNAs ETD02700-ETD02715 Targeting Human MS4A4E mRNA in Mice Transfected with AAV8-TBG-h-MS4A4E

[0403] The activities of siRNAs, namely ETD02700-ETD02715, were assessed in mice transiently expressing human MS4A4E. The siRNAs contain the GalNAc ligand ETL17 followed by a phosphorothioate linkage at the 5′ end of the sense strand. The siRNAs used in this Example are included in Table 16, where “Nf” is a 2′ fluoro-modified nucleoside, “n” is a 2′ O-methyl modified nucleoside, Nm (e.g. Am, Cm, Gm, Tm, or Um) is a 2′ 0-methoxyethyl modified nucleoside, “d” is a 2′ deoxynucleoside, and “s” is a phosphorothioate linkage. Their base sequences for each siRNA, shown with and without the 3′ UU extension, are shown in Table 17.

[0404] Six- to eight-week-old female mice (C57Bl/6) were injected with 10 μL of a recombinant adeno-associated virus 8 (AAV8) vector (9.6×10E12 genome copies/mL) mixed with 20 μL PBS/5% glycerol by the retroorbital route on Day −10. The recombinant AAV8 contains the open reading frame and the 5′ and 3′UTRs of the human MS4A4E sequence (Accession #ENST00000651255) under the control of the human thyroxine binding globulin promoter in an AAV2 backbone packaged in AAV8 capsid (AAV8-TBG-h-MS4A4E). On Day 0, infected mice (n=5) were given a subcutaneous injection of a single 100 ug dose of a GalNAc-conjugated siRNA or PBS as vehicle control.

[0405] Mice were euthanized on Day 7 after subcutaneous injection and a liver sample from each was collected and placed in RNAlater (ThermoFisher Catalog #AM7020) until processing. Total liver RNA was prepared by homogenizing the liver tissue in homogenization buffer (Maxwell RSC simplyRNA Tissue Kit) using a Percellys 24 tissue homogenizer (Bertin Instruments) set at 5000 rpm for two 10 second cycles. Total RNA from the lysate was purified on a Maxwell RSC 48 platform (Promega Corporation) according to the manufacturer's recommendations. Preparation of cDNA was performed using Quanta qScript cDNA SuperMix (VWR, Catalog #95048-500) according to the manufacturer's instructions. The relative levels of liver MS4A4E mRNA were assessed by RT-qPCR in triplicate on a QuantStudio™ 6 Pro Real-Time PCR System using a custom TaqMan assay for human MS4A4E (ThermoFisher), and the mouse housekeeping gene PPIA (ThermoFisher, assay #Mm02342430_g1), and PerfeCTa® qPCR FastMix®, Low ROX™ (VWR, Catalog #101419-222). Data were normalized to the mean MS4A4E mRNA level in animals receiving a subcutaneous injection of PBS. Results are shown in Table 18. Of the siRNAs in this screening set, mice injected with ETD02700, ETD02701, ETD02710 or ETD02705 had the highest level of human MS4A4E mRNA knockdown in the liver.

TABLE 16
Example siRNA Sequences

| | SEQ | | SEQ | |
|---|---|---|---|---|
| | ID | Sense Strand Sequence (5′-3′) | ID | |
| ETD# | NO | with GalNAc moiety | NO | Antisense Strand Sequence (5′-3′) |
| ETD02700 | 5021 | [ETL17]suucCmaAfAfCfAfucuAmcuagaasusu | 5037 | usUfscUfaGfuAfgAfuGfuUfuGfgAfasusu |
| ETD02701 | 5022 | [ETL17]sgucAmuAfCfAfUfucaTmaucugasusu | 5038 | usCfsaGfaUfaUfgAfaUfgUfaUfgAfcsusu |
| ETD02702 | 5023 | [ETL17]sagcAmgGfAfAfUfuagAmacaacasusu | 5039 | usGfsuUfgUfuCfuAfaUfuCfcUfgCfususu |
| ETD02703 | 5024 | [ETL17]suuaAmuCfAfAfUfgcaAmuaagcasusu | 5040 | usGfscUfuAfuUfgCfaUfuGfaUfuAfasusu |
| ETD02704 | 5025 | [ETL17]saauCmaAfUfGfCfaauAmagcuuasusu | 5041 | usAfsaGfcUfuAfuUfgCfaUfuGfaUfususu |
| ETD02705 | 5026 | [ETL17]saucAmaUfGfCfAfauaAmgcuugasusu | 5042 | usCfsaAfgCfuUfaUfuGfcAfuUfgAfususu |
| ETD02706 | 5027 | [ETL17]sucaAmuGfCfAfAfuaaGmcuugaasusu | 5043 | usUfscAfaGfcUfuAfuUfgCfaUfuGfasusu |
| ETD02707 | 5028 | [ETL17]scaaTmgCfAfAfUfaagCmuugacasusu | 5044 | usGfsuCfaAfgCfuUfaUfuGfcAfuUfgsusu |
| ETD02708 | 5029 | [ETL17]saauGmcAfAfUfAfagcTmugacgasusu | 5045 | usCfsgUfcAfaGfcUfuAfuUfgCfaUfususu |
| ETD02709 | 5030 | [ETL17]sugcAmaUfAfAfGfcuuGmacguuasusu | 5046 | usAfsaCfgUfcAfaGfcUfuAfuUfgCfasusu |
| ETD02710 | 5031 | [ETL17]sgcaAmuAfAfGfCfuugAmcguuuasusu | 5047 | usAfsaAfcGfuCfaAfgCfuUfaUfuGfcsusu |
| ETD02711 | 5032 | [ETL17]scaaTmaAfGfCfUfugaCmguuuuasusu | 5048 | usAfsaAfaCfgUfcAfaGfcUfuAfuUfgsusu |
| ETD02712 | 5033 | [ETL17]saauAmaGfCfUfUfgacGmuuuuaasusu | 5049 | usUfsaAfaAfcGfuCfaAfgCfuUfaUfususu |
| ETD02713 | 5034 | [ETL17]sauaAmgCfUfUfGfacgTmuuuauasusu | 5050 | usAfsuAfaAfaCfgUfcAfaGfcUfuAfususu |
| ETD02714 | 5035 | [ETL17]saguGmcUfUfUfGfuugTmagcccasusu | 5051 | usGfsgGfcUfaCfaAfcAfaAfgCfaCfususu |
| ETD02715 | 5036 | [ETL17]sgugCmuUfUfGfUfuguAmgccccasusu | 5052 | usGfsgGfgCfuAfcAfaCfaAfaGfcAfcsusu |

TABLE 17
Example siRNA BASE Sequences

| SiRNA | SEQ ID | Sense Strand Base | SEQ ID | Antisense Strand Base |
|---|---|---|---|---|
| Name | NO: | Sequence (5′ to 3′) | NO: | Sequence (5′ to 3′) |
| ETD02700 | 5053 | UUCCAAACAUCUACUAGAAUU | 5085 | UUCUAGUAGAUGUUUGGAAUU |
| ETD02701 | 5054 | GUCAUACAUUCAUAUCUGAUU | 5086 | UCAGAUAUGAAUGUAUGACUU |
| ETD02702 | 5055 | AGCAGGAAUUAGAACAACAUU | 5087 | UGUUGUUCUAAUUCCUGCUUU |
| ETD02703 | 5056 | UUAAUCAAUGCAAUAAGCAUU | 5088 | UGCUUAUUGCAUUGAUUAAUU |
| ETD02704 | 5057 | AAUCAAUGCAAUAAGCUUAUU | 5089 | UAAGCUUAUUGCAUUGAUUUU |
| ETD02705 | 5058 | AUCAAUGCAAUAAGCUUGAUU | 5090 | UCAAGCUUAUUGCAUUGAUUU |
| ETD02706 | 5059 | UCAAUGCAAUAAGCUUGAAUU | 5091 | UUCAAGCUUAUUGCAUUGAUU |
| ETD02707 | 5060 | CAAUGCAAUAAGCUUGACAUU | 5092 | UGUCAAGCUUAUUGCAUUGUU |
| ETD02708 | 5061 | AAUGCAAUAAGCUUGACGAUU | 5093 | UCGUCAAGCUUAUUGCAUUUU |
| ETD02709 | 5062 | UGCAAUAAGCUUGACGUUAUU | 5094 | UAACGUCAAGCUUAUUGCAUU |
| ETD02710 | 5063 | GCAAUAAGCUUGACGUUUAUU | 5095 | UAAACGUCAAGCUUAUUGCUU |
| ETD02711 | 5064 | CAAUAAGCUUGACGUUUUAUU | 5096 | UAAAACGUCAAGCUUAUUGUU |
| ETD02712 | 5065 | AAUAAGCUUGACGUUUUAAUU | 5097 | UUAAAACGUCAAGCUUAUUUU |
| ETD02713 | 5066 | AUAAGCUUGACGUUUUAUAUU | 5098 | UAUAAAACGUCAAGCUUAUUU |
| ETD02714 | 5067 | AGUGCUUUGUUGUAGCCCAUU | 5099 | UGGGCUACAACAAAGCACUUU |
| ETD02715 | 5068 | GUGCUUUGUUGUAGCCCCAUU | 5100 | UGGGGCUACAACAAAGCACUU |
| | | Sense Strand Base | | Antisense Strand Base |
| siRNA | SEQ ID | Sequence (5′ to 3′), | SEQ ID | Sequence (5′ to 3′), |
| Name | NO: | without 3′ overhangs | NO: | without 3′ overhangs |
| ETD02700 | 27 | UUCCAAACAUCUACUAGAA | 2474 | UUCUAGUAGAUGUUUGGAA |
| ETD02701 | 272 | GUCAUACAUUCAUAUCUGA | 2719 | UCAGAUAUGAAUGUAUGAC |
| ETD02702 | 391 | AGCAGGAAUUAGAACAACA | 2838 | UGUUGUUCUAAUUCCUGCU |
| ETD02703 | 476 | UUAAUCAAUGCAAUAAGCA | 2923 | UGCUUAUUGCAUUGAUUAA |
| ETD02704 | 478 | AAUCAAUGCAAUAAGCUUA | 2925 | UAAGCUUAUUGCAUUGAUU |
| ETD02705 | 479 | AUCAAUGCAAUAAGCUUGA | 2926 | UCAAGCUUAUUGCAUUGAU |
| ETD02706 | 480 | UCAAUGCAAUAAGCUUGAA | 2927 | UUCAAGCUUAUUGCAUUGA |
| ETD02707 | 481 | CAAUGCAAUAAGCUUGACA | 2928 | UGUCAAGCUUAUUGCAUUG |
| ETD02708 | 482 | AAUGCAAUAAGCUUGACGA | 2929 | UCGUCAAGCUUAUUGCAUU |
| ETD02709 | 484 | UGCAAUAAGCUUGACGUUA | 2931 | UAACGUCAAGCUUAUUGCA |
| ETD02710 | 485 | GCAAUAAGCUUGACGUUUA | 2932 | UAAACGUCAAGCUUAUUGC |
| ETD02711 | 486 | CAAUAAGCUUGACGUUUUA | 2933 | UAAAACGUCAAGCUUAUUG |
| ETD02712 | 487 | AAUAAGCUUGACGUUUUAA | 2934 | UUAAAACGUCAAGCUUAUU |
| ETD02713 | 488 | AUAAGCUUGACGUUUUAUA | 2935 | UAUAAAACGUCAAGCUUAU |
| ETD02714 | 655 | AGUGCUUUGUUGUAGCCCA | 3102 | UGGGCUACAACAAAGCACU |
| ETD02715 | 656 | GUGCUUUGUUGUAGCCCCA | 3103 | UGGGGCUACAACAAAGCAC |
| | | Sense Strand Base | | Antisense Strand Base |
| SIRNA | SEQ ID | Sequence (5′ to 3′), without | SEQ ID | Sequence (5′ to 3′), without 3′ |
| Name | NO: | 3′ overhangs without 3′ A | NO: | overhangs without 5′ U |
| ETD02700 | 5069 | UUCCAAACAUCUACUAGA | 5101 | UCUAGUAGAUGUUUGGAA |
| ETD02701 | 5070 | GUCAUACAUUCAUAUCUG | 5102 | CAGAUAUGAAUGUAUGAC |
| ETD02702 | 5071 | AGCAGGAAUUAGAACAAC | 5103 | GUUGUUCUAAUUCCUGCU |
| ETD02703 | 5072 | UUAAUCAAUGCAAUAAGC | 5104 | GCUUAUUGCAUUGAUUAA |
| ETD02704 | 5073 | AAUCAAUGCAAUAAGCUU | 5105 | AAGCUUAUUGCAUUGAUU |
| ETD02705 | 5074 | AUCAAUGCAAUAAGCUUG | 5106 | CAAGCUUAUUGCAUUGAU |
| ETD02706 | 5075 | UCAAUGCAAUAAGCUUGA | 5107 | UCAAGCUUAUUGCAUUGA |
| ETD02707 | 5076 | CAAUGCAAUAAGCUUGAC | 5108 | GUCAAGCUUAUUGCAUUG |
| ETD02708 | 5077 | AAUGCAAUAAGCUUGACG | 5109 | CGUCAAGCUUAUUGCAUU |
| ETD02709 | 5078 | UGCAAUAAGCUUGACGUU | 5110 | AACGUCAAGCUUAUUGCA |
| ETD02710 | 5079 | GCAAUAAGCUUGACGUUU | 5111 | AAACGUCAAGCUUAUUGC |
| ETD02711 | 5080 | CAAUAAGCUUGACGUUUU | 5112 | AAAACGUCAAGCUUAUUG |
| ETD02712 | 5081 | AAUAAGCUUGACGUUUUA | 5113 | UAAAACGUCAAGCUUAUU |
| ETD02713 | 5082 | AUAAGCUUGACGUUUUAU | 5114 | AUAAAACGUCAAGCUUAU |
| ETD02714 | 5083 | AGUGCUUUGUUGUAGCCC | 5115 | GGGCUACAACAAAGCACU |
| ETD02715 | 5084 | GUGCUUUGUUGUAGCCCC | 5116 | GGGGCUACAACAAAGCAC |

TABLE 18
Relative MS4A4E mRNA Levels in Livers of
Mice Transfected with AAV8-TGB-h-MS4A4E.

| | | | | Mean MS4A4E mRNA |
|---|---|---|---|---|
| | | | | (Normalized to Group 1, Day 7) |
| Group | n | Treatment | Dose (ug) | Human MS4A4E mRNA |
| 1 | 5 | PBS | | 1.00 |
| 2 | 5 | ETD02700 | 100 | 1.07E−04 |
| 3 | 5 | ETD02701 | 100 | 0.23 |
| 4 | 5 | ETD02702 | 100 | 0.48 |
| 5 | 5 | ETD02703 | 100 | 0.62 |
| 6 | 5 | ETD02704 | 100 | 0.51 |
| 7 | 5 | ETD02705 | 100 | 0.41 |
| 8 | 5 | ETD02706 | 100 | 0.49 |
| 9 | 5 | ETD02707 | 100 | 0.55 |
| 10 | 5 | ETD02708 | 100 | 0.55 |
| 11 | 5 | ETD02709 | 100 | 0.52 |
| 12 | 5 | ETD02710 | 100 | 0.36 |
| 13 | 5 | ETD02711 | 100 | 0.56 |
| 14 | 5 | ETD02712 | 100 | 0.59 |
| 15 | 5 | ETD02713 | 100 | 0.56 |
| 16 | 5 | ETD02714 | 100 | 0.73 |
| 17 | 5 | ETD02715 | 100 | 0.47 |

[0406] While preferred embodiments of the present invention have been shown and described herein, it will be obvious to those skilled in the art that such embodiments are provided by way of example only. Numerous variations, changes, and substitutions will now occur to those skilled in the art without departing from the invention. It should be understood that various alternatives to the embodiments of the invention described herein may be employed in practicing the invention. It is intended that the following claims define the scope of the invention and that methods and compositions within the scope of these claims and their equivalents be covered thereby.

### IV. SEQUENCE INFORMATION

[0407] Some embodiments include one or more nucleic acid sequences in the following tables:

TABLE 19
Sequence Information

| SEQ ID | |
|---|---|
| NO: | Description |
| 1-2447 | Unmodified siRNA sense strand sequences |
| 2448-4894 | Unmodified siRNA antisense strand sequences |
| 4895-4915 | Modified siRNA sense strand sequences |
| 4916-4936 | Modified siRNA antisense sequences |
| 4937-5020 | Alternatively modified siRNA sense strand sequences |
| 5021-5036 | Modified siRNA sense strand sequences |
| 5037-5052 | Modified siRNA antisense strand sequences |
| 5053-5084 | Unmodified siRNA sense strand sequences |
| 5085-5116 | Modified siRNA antisense strand sequences |
| 5117 | Full-length human MS4A4E mRNA sequence (based on |
| | Ensembl Acc. No. ENST00000651255.1) |

TABLE 20A
Example siRNA Sequences

| siRNA | SEQ | Sense strand | SEQ | Antisense strand |
|---|---|---|---|---|
| Name | ID NO: | sequence (5′-3′) | ID NO: | sequence (5′-3′) |
| siRNA 1 | 1 | AGAAGUUCUCAACACAUCC | 2448 | GGAUGUGUUGAGAACUUCU |
| siRNA 2 | 2 | GAAGUUCUCAACACAUCCU | 2449 | AGGAUGUGUUGAGAACUUC |
| siRNA 3 | 3 | AAGUUCUCAACACAUCCUU | 2450 | AAGGAUGUGUUGAGAACUU |
| siRNA 4 | 4 | AGUUCUCAACACAUCCUUU | 2451 | AAAGGAUGUGUUGAGAACU |
| siRNA 5 | 5 | GUUCUCAACACAUCCUUUA | 2452 | UAAAGGAUGUGUUGAGAAC |
| siRNA 6 | 6 | UUCUCAACACAUCCUUUAA | 2453 | UUAAAGGAUGUGUUGAGAA |
| siRNA 7 | 7 | UCUCAACACAUCCUUUAAG | 2454 | CUUAAAGGAUGUGUUGAGA |
| siRNA 8 | 8 | CUCAACACAUCCUUUAAGG | 2455 | CCUUAAAGGAUGUGUUGAG |
| siRNA 9 | 9 | UCAACACAUCCUUUAAGGU | 2456 | ACCUUAAAGGAUGUGUUGA |
| siRNA 10 | 10 | CAACACAUCCUUUAAGGUU | 2457 | AACCUUAAAGGAUGUGUUG |
| siRNA 11 | 11 | AACACAUCCUUUAAGGUUC | 2458 | GAACCUUAAAGGAUGUGUU |
| siRNA 12 | 12 | ACACAUCCUUUAAGGUUCC | 2459 | GGAACCUUAAAGGAUGUGU |
| siRNA 13 | 13 | CACAUCCUUUAAGGUUCCA | 2460 | UGGAACCUUAAAGGAUGUG |
| siRNA 14 | 14 | ACAUCCUUUAAGGUUCCAA | 2461 | UUGGAACCUUAAAGGAUGU |
| siRNA 15 | 15 | CAUCCUUUAAGGUUCCAAA | 2462 | UUUGGAACCUUAAAGGAUG |
| siRNA 16 | 16 | AUCCUUUAAGGUUCCAAAC | 2463 | GUUUGGAACCUUAAAGGAU |
| siRNA 17 | 17 | UCCUUUAAGGUUCCAAACA | 2464 | UGUUUGGAACCUUAAAGGA |
| siRNA 18 | 18 | CCUUUAAGGUUCCAAACAU | 2465 | AUGUUUGGAACCUUAAAGG |
| siRNA 19 | 19 | CUUUAAGGUUCCAAACAUC | 2466 | GAUGUUUGGAACCUUAAAG |
| siRNA 20 | 20 | UUUAAGGUUCCAAACAUCU | 2467 | AGAUGUUUGGAACCUUAAA |
| siRNA 21 | 21 | UUAAGGUUCCAAACAUCUA | 2468 | UAGAUGUUUGGAACCUUAA |
| siRNA 22 | 22 | UAAGGUUCCAAACAUCUAC | 2469 | GUAGAUGUUUGGAACCUUA |
| siRNA 23 | 23 | AAGGUUCCAAACAUCUACU | 2470 | AGUAGAUGUUUGGAACCUU |
| siRNA 24 | 24 | AGGUUCCAAACAUCUACUA | 2471 | UAGUAGAUGUUUGGAACCU |
| siRNA 25 | 25 | GGUUCCAAACAUCUACUAG | 2472 | CUAGUAGAUGUUUGGAACC |
| siRNA 26 | 26 | GUUCCAAACAUCUACUAGA | 2473 | UCUAGUAGAUGUUUGGAAC |
| siRNA 27 | 27 | UUCCAAACAUCUACUAGAA | 2474 | UUCUAGUAGAUGUUUGGAA |
| siRNA 28 | 28 | UCCAAACAUCUACUAGAAA | 2475 | UUUCUAGUAGAUGUUUGGA |
| siRNA 29 | 29 | CCAAACAUCUACUAGAAAA | 2476 | UUUUCUAGUAGAUGUUUGG |
| siRNA 30 | 30 | CAAACAUCUACUAGAAAAG | 2477 | CUUUUCUAGUAGAUGUUUG |
| siRNA 31 | 31 | AAACAUCUACUAGAAAAGG | 2478 | CCUUUUCUAGUAGAUGUUU |
| siRNA 32 | 32 | AACAUCUACUAGAAAAGGA | 2479 | UCCUUUUCUAGUAGAUGUU |
| siRNA 33 | 33 | ACAUCUACUAGAAAAGGAG | 2480 | CUCCUUUUCUAGUAGAUGU |
| siRNA 34 | 34 | CAUCUACUAGAAAAGGAGU | 2481 | ACUCCUUUUCUAGUAGAUG |
| siRNA 35 | 35 | AUCUACUAGAAAAGGAGUG | 2482 | CACUCCUUUUCUAGUAGAU |
| siRNA 36 | 36 | UCUACUAGAAAAGGAGUGC | 2483 | GCACUCCUUUUCUAGUAGA |
| siRNA 37 | 37 | CUACUAGAAAAGGAGUGCA | 2484 | UGCACUCCUUUUCUAGUAG |
| siRNA 38 | 38 | UACUAGAAAAGGAGUGCAG | 2485 | CUGCACUCCUUUUCUAGUA |
| siRNA 39 | 39 | ACUAGAAAAGGAGUGCAGA | 2486 | UCUGCACUCCUUUUCUAGU |
| siRNA 40 | 40 | CUAGAAAAGGAGUGCAGAU | 2487 | AUCUGCACUCCUUUUCUAG |
| siRNA 41 | 41 | UAGAAAAGGAGUGCAGAUU | 2488 | AAUCUGCACUCCUUUUCUA |
| siRNA 42 | 42 | AGAAAAGGAGUGCAGAUUU | 2489 | AAAUCUGCACUCCUUUUCU |
| siRNA 43 | 43 | GAAAAGGAGUGCAGAUUUA | 2490 | UAAAUCUGCACUCCUUUUC |
| siRNA 44 | 44 | AAAAGGAGUGCAGAUUUAA | 2491 | UUAAAUCUGCACUCCUUUU |
| siRNA 45 | 45 | AAAGGAGUGCAGAUUUAAA | 2492 | UUUAAAUCUGCACUCCUUU |
| siRNA 46 | 46 | AAGGAGUGCAGAUUUAAAC | 2493 | GUUUAAAUCUGCACUCCUU |
| siRNA 47 | 47 | AGGAGUGCAGAUUUAAACU | 2494 | AGUUUAAAUCUGCACUCCU |
| siRNA 48 | 48 | GGAGUGCAGAUUUAAACUG | 2495 | CAGUUUAAAUCUGCACUCC |
| siRNA 49 | 49 | GAGUGCAGAUUUAAACUGA | 2496 | UCAGUUUAAAUCUGCACUC |
| siRNA 50 | 50 | AGUGCAGAUUUAAACUGAG | 2497 | CUCAGUUUAAAUCUGCACU |
| siRNA 51 | 51 | GUGCAGAUUUAAACUGAGU | 2498 | ACUCAGUUUAAAUCUGCAC |
| siRNA 52 | 52 | UGCAGAUUUAAACUGAGUG | 2499 | CACUCAGUUUAAAUCUGCA |
| siRNA 53 | 53 | GCAGAUUUAAACUGAGUGA | 2500 | UCACUCAGUUUAAAUCUGC |
| siRNA 54 | 54 | CAGAUUUAAACUGAGUGAG | 2501 | CUCACUCAGUUUAAAUCUG |
| siRNA 55 | 55 | AGAUUUAAACUGAGUGAGG | 2502 | CCUCACUCAGUUUAAAUCU |
| siRNA 56 | 56 | GAUUUAAACUGAGUGAGGU | 2503 | ACCUCACUCAGUUUAAAUC |
| siRNA 57 | 57 | AUUUAAACUGAGUGAGGUG | 2504 | CACCUCACUCAGUUUAAAU |
| siRNA 58 | 58 | UUUAAACUGAGUGAGGUGU | 2505 | ACACCUCACUCAGUUUAAA |
| siRNA 59 | 59 | UUAAACUGAGUGAGGUGUG | 2506 | CACACCUCACUCAGUUUAA |
| siRNA 60 | 60 | UAAACUGAGUGAGGUGUGG | 2507 | CCACACCUCACUCAGUUUA |
| siRNA 61 | 61 | AAACUGAGUGAGGUGUGGA | 2508 | UCCACACCUCACUCAGUUU |
| siRNA 62 | 62 | AACUGAGUGAGGUGUGGAG | 2509 | CUCCACACCUCACUCAGUU |
| siRNA 63 | 63 | ACUGAGUGAGGUGUGGAGU | 2510 | ACUCCACACCUCACUCAGU |
| siRNA 64 | 64 | CUGAGUGAGGUGUGGAGUG | 2511 | CACUCCACACCUCACUCAG |
| siRNA 65 | 65 | UGAGUGAGGUGUGGAGUGG | 2512 | CCACUCCACACCUCACUCA |
| siRNA 66 | 66 | GAGUGAGGUGUGGAGUGGG | 2513 | CCCACUCCACACCUCACUC |
| siRNA 67 | 67 | AGUGAGGUGUGGAGUGGGG | 2514 | CCCCACUCCACACCUCACU |
| siRNA 68 | 68 | GUGAGGUGUGGAGUGGGGG | 2515 | CCCCCACUCCACACCUCAC |
| siRNA 69 | 69 | UGAGGUGUGGAGUGGGGGA | 2516 | UCCCCCACUCCACACCUCA |
| siRNA 70 | 70 | GAGGUGUGGAGUGGGGGAA | 2517 | UUCCCCCACUCCACACCUC |
| siRNA 71 | 71 | AGGUGUGGAGUGGGGGAAG | 2518 | CUUCCCCCACUCCACACCU |
| siRNA 72 | 72 | GGUGUGGAGUGGGGGAAGC | 2519 | GCUUCCCCCACUCCACACC |
| siRNA 73 | 73 | GUGUGGAGUGGGGGAAGCU | 2520 | AGCUUCCCCCACUCCACAC |
| siRNA 74 | 74 | UGUGGAGUGGGGGAAGCUG | 2521 | CAGCUUCCCCCACUCCACA |
| siRNA 75 | 75 | GUGGAGUGGGGGAAGCUGA | 2522 | UCAGCUUCCCCCACUCCAC |
| siRNA 76 | 76 | UGGAGUGGGGGAAGCUGAC | 2523 | GUCAGCUUCCCCCACUCCA |
| siRNA 77 | 77 | GGAGUGGGGGAAGCUGACU | 2524 | AGUCAGCUUCCCCCACUCC |
| siRNA 78 | 78 | GAGUGGGGGAAGCUGACUG | 2525 | CAGUCAGCUUCCCCCACUC |
| siRNA 79 | 79 | AGUGGGGGAAGCUGACUGU | 2526 | ACAGUCAGCUUCCCCCACU |
| siRNA 80 | 80 | GUGGGGGAAGCUGACUGUG | 2527 | CACAGUCAGCUUCCCCCAC |
| siRNA 81 | 81 | UGGGGGAAGCUGACUGUGU | 2528 | ACACAGUCAGCUUCCCCCA |
| siRNA 82 | 82 | GGGGGAAGCUGACUGUGUC | 2529 | GACACAGUCAGCUUCCCCC |
| siRNA 83 | 83 | GGGGAAGCUGACUGUGUCU | 2530 | AGACACAGUCAGCUUCCCC |
| siRNA 84 | 84 | GGGAAGCUGACUGUGUCUG | 2531 | CAGACACAGUCAGCUUCCC |
| siRNA 85 | 85 | GGAAGCUGACUGUGUCUGG | 2532 | CCAGACACAGUCAGCUUCC |
| siRNA 86 | 86 | GAAGCUGACUGUGUCUGGA | 2533 | UCCAGACACAGUCAGCUUC |
| siRNA 87 | 87 | AAGCUGACUGUGUCUGGAA | 2534 | UUCCAGACACAGUCAGCUU |
| siRNA 88 | 88 | AGCUGACUGUGUCUGGAAC | 2535 | GUUCCAGACACAGUCAGCU |
| siRNA 89 | 89 | GCUGACUGUGUCUGGAACA | 2536 | UGUUCCAGACACAGUCAGC |
| siRNA 90 | 90 | CUGACUGUGUCUGGAACAA | 2537 | UUGUUCCAGACACAGUCAG |
| siRNA 91 | 91 | UGACUGUGUCUGGAACAAA | 2538 | UUUGUUCCAGACACAGUCA |
| siRNA 92 | 92 | GACUGUGUCUGGAACAAAG | 2539 | CUUUGUUCCAGACACAGUC |
| siRNA 93 | 93 | ACUGUGUCUGGAACAAAGA | 2540 | UCUUUGUUCCAGACACAGU |
| siRNA 94 | 94 | CUGUGUCUGGAACAAAGAA | 2541 | UUCUUUGUUCCAGACACAG |
| siRNA 95 | 95 | UGUGUCUGGAACAAAGAAC | 2542 | GUUCUUUGUUCCAGACACA |
| siRNA 96 | 96 | GUGUCUGGAACAAAGAACU | 2543 | AGUUCUUUGUUCCAGACAC |
| siRNA 97 | 97 | UGUCUGGAACAAAGAACUU | 2544 | AAGUUCUUUGUUCCAGACA |
| siRNA 98 | 98 | GUCUGGAACAAAGAACUUU | 2545 | AAAGUUCUUUGUUCCAGAC |
| siRNA 99 | 99 | UCUGGAACAAAGAACUUUG | 2546 | CAAAGUUCUUUGUUCCAGA |
| siRNA 100 | 100 | CUGGAACAAAGAACUUUGA | 2547 | UCAAAGUUCUUUGUUCCAG |
| siRNA 101 | 101 | UGGAACAAAGAACUUUGAG | 2548 | CUCAAAGUUCUUUGUUCCA |
| siRNA 102 | 102 | GGAACAAAGAACUUUGAGG | 2549 | CCUCAAAGUUCUUUGUUCC |
| siRNA 103 | 103 | GAACAAAGAACUUUGAGGA | 2550 | UCCUCAAAGUUCUUUGUUC |
| siRNA 104 | 104 | AACAAAGAACUUUGAGGAA | 2551 | UUCCUCAAAGUUCUUUGUU |
| siRNA 105 | 105 | ACAAAGAACUUUGAGGAAC | 2552 | GUUCCUCAAAGUUCUUUGU |
| siRNA 106 | 106 | CAAAGAACUUUGAGGAACU | 2553 | AGUUCCUCAAAGUUCUUUG |
| siRNA 107 | 107 | AAAGAACUUUGAGGAACUU | 2554 | AAGUUCCUCAAAGUUCUUU |
| siRNA 108 | 108 | AAGAACUUUGAGGAACUUG | 2555 | CAAGUUCCUCAAAGUUCUU |
| siRNA 109 | 109 | AGAACUUUGAGGAACUUGC | 2556 | GCAAGUUCCUCAAAGUUCU |
| siRNA 110 | 110 | GAACUUUGAGGAACUUGCC | 2557 | GGCAAGUUCCUCAAAGUUC |
| siRNA 111 | 111 | AACUUUGAGGAACUUGCCC | 2558 | GGGCAAGUUCCUCAAAGUU |
| siRNA 112 | 112 | ACUUUGAGGAACUUGCCCA | 2559 | UGGGCAAGUUCCUCAAAGU |
| siRNA 113 | 113 | CUUUGAGGAACUUGCCCAG | 2560 | CUGGGCAAGUUCCUCAAAG |
| siRNA 114 | 114 | UUUGAGGAACUUGCCCAGA | 2561 | UCUGGGCAAGUUCCUCAAA |
| siRNA 115 | 115 | UUGAGGAACUUGCCCAGAG | 2562 | CUCUGGGCAAGUUCCUCAA |
| siRNA 116 | 116 | UGAGGAACUUGCCCAGAGC | 2563 | GCUCUGGGCAAGUUCCUCA |
| siRNA 117 | 117 | GAGGAACUUGCCCAGAGCC | 2564 | GGCUCUGGGCAAGUUCCUC |
| siRNA 118 | 118 | AGGAACUUGCCCAGAGCCC | 2565 | GGGCUCUGGGCAAGUUCCU |
| siRNA 119 | 119 | GGAACUUGCCCAGAGCCCU | 2566 | AGGGCUCUGGGCAAGUUCC |
| siRNA 120 | 120 | GAACUUGCCCAGAGCCCUG | 2567 | CAGGGCUCUGGGCAAGUUC |
| siRNA 121 | 121 | AACUUGCCCAGAGCCCUGC | 2568 | GCAGGGCUCUGGGCAAGUU |
| siRNA 122 | 122 | ACUUGCCCAGAGCCCUGCA | 2569 | UGCAGGGCUCUGGGCAAGU |
| siRNA 123 | 123 | CUUGCCCAGAGCCCUGCAC | 2570 | GUGCAGGGCUCUGGGCAAG |
| siRNA 124 | 124 | UUGCCCAGAGCCCUGCACU | 2571 | AGUGCAGGGCUCUGGGCAA |
| siRNA 125 | 125 | UGCCCAGAGCCCUGCACUC | 2572 | GAGUGCAGGGCUCUGGGCA |
| siRNA 126 | 126 | GCCCAGAGCCCUGCACUCA | 2573 | UGAGUGCAGGGCUCUGGGC |
| siRNA 127 | 127 | CCCAGAGCCCUGCACUCAU | 2574 | AUGAGUGCAGGGCUCUGGG |
| siRNA 128 | 128 | CCAGAGCCCUGCACUCAUC | 2575 | GAUGAGUGCAGGGCUCUGG |
| siRNA 129 | 129 | CAGAGCCCUGCACUCAUCA | 2576 | UGAUGAGUGCAGGGCUCUG |
| siRNA 130 | 130 | AGAGCCCUGCACUCAUCAG | 2577 | CUGAUGAGUGCAGGGCUCU |
| siRNA 131 | 131 | GAGCCCUGCACUCAUCAGA | 2578 | UCUGAUGAGUGCAGGGCUC |
| siRNA 132 | 132 | AGCCCUGCACUCAUCAGAC | 2579 | GUCUGAUGAGUGCAGGGCU |
| siRNA 133 | 133 | GCCCUGCACUCAUCAGACC | 2580 | GGUCUGAUGAGUGCAGGGC |
| siRNA 134 | 134 | CCCUGCACUCAUCAGACCU | 2581 | AGGUCUGAUGAGUGCAGGG |
| siRNA 135 | 135 | CCUGCACUCAUCAGACCUG | 2582 | CAGGUCUGAUGAGUGCAGG |
| siRNA 136 | 136 | CUGCACUCAUCAGACCUGC | 2583 | GCAGGUCUGAUGAGUGCAG |
| siRNA 137 | 137 | UGCACUCAUCAGACCUGCA | 2584 | UGCAGGUCUGAUGAGUGCA |
| siRNA 138 | 138 | GCACUCAUCAGACCUGCAG | 2585 | CUGCAGGUCUGAUGAGUGC |
| siRNA 139 | 139 | CACUCAUCAGACCUGCAGC | 2586 | GCUGCAGGUCUGAUGAGUG |
| siRNA 140 | 140 | ACUCAUCAGACCUGCAGCA | 2587 | UGCUGCAGGUCUGAUGAGU |
| siRNA 141 | 141 | CUCAUCAGACCUGCAGCAG | 2588 | CUGCUGCAGGUCUGAUGAG |
| siRNA 142 | 142 | UCAUCAGACCUGCAGCAGA | 2589 | UCUGCUGCAGGUCUGAUGA |
| siRNA 143 | 143 | CAUCAGACCUGCAGCAGAC | 2590 | GUCUGCUGCAGGUCUGAUG |
| siRNA 144 | 144 | AUCAGACCUGCAGCAGACA | 2591 | UGUCUGCUGCAGGUCUGAU |
| siRNA 145 | 145 | UCAGACCUGCAGCAGACAU | 2592 | AUGUCUGCUGCAGGUCUGA |
| siRNA 146 | 146 | CAGACCUGCAGCAGACAUU | 2593 | AAUGUCUGCUGCAGGUCUG |
| siRNA 147 | 147 | AGACCUGCAGCAGACAUUG | 2594 | CAAUGUCUGCUGCAGGUCU |
| siRNA 148 | 148 | GACCUGCAGCAGACAUUGC | 2595 | GCAAUGUCUGCUGCAGGUC |
| siRNA 149 | 149 | ACCUGCAGCAGACAUUGCA | 2596 | UGCAAUGUCUGCUGCAGGU |
| siRNA 150 | 150 | CCUGCAGCAGACAUUGCAG | 2597 | CUGCAAUGUCUGCUGCAGG |
| siRNA 151 | 151 | CUGCAGCAGACAUUGCAGG | 2598 | CCUGCAAUGUCUGCUGCAG |
| siRNA 152 | 152 | UGCAGCAGACAUUGCAGGC | 2599 | GCCUGCAAUGUCUGCUGCA |
| siRNA 153 | 153 | GCAGCAGACAUUGCAGGCC | 2600 | GGCCUGCAAUGUCUGCUGC |
| siRNA 154 | 154 | CAGCAGACAUUGCAGGCCU | 2601 | AGGCCUGCAAUGUCUGCUG |
| siRNA 155 | 155 | AGCAGACAUUGCAGGCCUG | 2602 | CAGGCCUGCAAUGUCUGCU |
| siRNA 156 | 156 | GCAGACAUUGCAGGCCUGA | 2603 | UCAGGCCUGCAAUGUCUGC |
| siRNA 157 | 157 | CAGACAUUGCAGGCCUGAA | 2604 | UUCAGGCCUGCAAUGUCUG |
| siRNA 158 | 158 | AGACAUUGCAGGCCUGAAG | 2605 | CUUCAGGCCUGCAAUGUCU |
| siRNA 159 | 159 | GACAUUGCAGGCCUGAAGA | 2606 | UCUUCAGGCCUGCAAUGUC |
| siRNA 160 | 160 | ACAUUGCAGGCCUGAAGAA | 2607 | UUCUUCAGGCCUGCAAUGU |
| siRNA 161 | 161 | CAUUGCAGGCCUGAAGAAA | 2608 | UUUCUUCAGGCCUGCAAUG |
| siRNA 162 | 162 | AUUGCAGGCCUGAAGAAAG | 2609 | CUUUCUUCAGGCCUGCAAU |
| siRNA 163 | 163 | UUGCAGGCCUGAAGAAAGC | 2610 | GCUUUCUUCAGGCCUGCAA |
| siRNA 164 | 164 | UGCAGGCCUGAAGAAAGCA | 2611 | UGCUUUCUUCAGGCCUGCA |
| siRNA 165 | 165 | GCAGGCCUGAAGAAAGCAC | 2612 | GUGCUUUCUUCAGGCCUGC |
| siRNA 166 | 166 | CAGGCCUGAAGAAAGCACC | 2613 | GGUGCUUUCUUCAGGCCUG |
| siRNA 167 | 167 | AGGCCUGAAGAAAGCACCU | 2614 | AGGUGCUUUCUUCAGGCCU |
| siRNA 168 | 168 | GGCCUGAAGAAAGCACCUU | 2615 | AAGGUGCUUUCUUCAGGCC |
| siRNA 169 | 169 | GCCUGAAGAAAGCACCUUU | 2616 | AAAGGUGCUUUCUUCAGGC |
| siRNA 170 | 170 | CCUGAAGAAAGCACCUUUU | 2617 | AAAAGGUGCUUUCUUCAGG |
| siRNA 171 | 171 | CUGAAGAAAGCACCUUUUC | 2618 | GAAAAGGUGCUUUCUUCAG |
| siRNA 172 | 172 | UGAAGAAAGCACCUUUUCU | 2619 | AGAAAAGGUGCUUUCUUCA |
| siRNA 173 | 173 | GAAGAAAGCACCUUUUCUG | 2620 | CAGAAAAGGUGCUUUCUUC |
| siRNA 174 | 174 | AAGAAAGCACCUUUUCUGC | 2621 | GCAGAAAAGGUGCUUUCUU |
| siRNA 175 | 175 | AGAAAGCACCUUUUCUGCU | 2622 | AGCAGAAAAGGUGCUUUCU |
| siRNA 176 | 176 | GAAAGCACCUUUUCUGCUG | 2623 | CAGCAGAAAAGGUGCUUUC |
| siRNA 177 | 177 | AAAGCACCUUUUCUGCUGC | 2624 | GCAGCAGAAAAGGUGCUUU |
| siRNA 178 | 178 | AAGCACCUUUUCUGCUGCC | 2625 | GGCAGCAGAAAAGGUGCUU |
| siRNA 179 | 179 | AGCACCUUUUCUGCUGCCA | 2626 | UGGCAGCAGAAAAGGUGCU |
| siRNA 180 | 180 | GCACCUUUUCUGCUGCCAU | 2627 | AUGGCAGCAGAAAAGGUGC |
| siRNA 181 | 181 | CACCUUUUCUGCUGCCAUG | 2628 | CAUGGCAGCAGAAAAGGUG |
| siRNA 182 | 182 | ACCUUUUCUGCUGCCAUGA | 2629 | UCAUGGCAGCAGAAAAGGU |
| siRNA 183 | 183 | CCUUUUCUGCUGCCAUGAC | 2630 | GUCAUGGCAGCAGAAAAGG |
| siRNA 184 | 184 | CUUUUCUGCUGCCAUGACA | 2631 | UGUCAUGGCAGCAGAAAAG |
| siRNA 185 | 185 | UUUUCUGCUGCCAUGACAA | 2632 | UUGUCAUGGCAGCAGAAAA |
| siRNA 186 | 186 | UUUCUGCUGCCAUGACAAC | 2633 | GUUGUCAUGGCAGCAGAAA |
| siRNA 187 | 187 | UUCUGCUGCCAUGACAACC | 2634 | GGUUGUCAUGGCAGCAGAA |
| siRNA 188 | 188 | UCUGCUGCCAUGACAACCA | 2635 | UGGUUGUCAUGGCAGCAGA |
| siRNA 189 | 189 | CUGCUGCCAUGACAACCAU | 2636 | AUGGUUGUCAUGGCAGCAG |
| siRNA 190 | 190 | UGCUGCCAUGACAACCAUG | 2637 | CAUGGUUGUCAUGGCAGCA |
| siRNA 191 | 191 | GCUGCCAUGACAACCAUGC | 2638 | GCAUGGUUGUCAUGGCAGC |
| siRNA 192 | 192 | CUGCCAUGACAACCAUGCA | 2639 | UGCAUGGUUGUCAUGGCAG |
| siRNA 193 | 193 | UGCCAUGACAACCAUGCAA | 2640 | UUGCAUGGUUGUCAUGGCA |
| siRNA 194 | 194 | GCCAUGACAACCAUGCAAG | 2641 | CUUGCAUGGUUGUCAUGGC |
| siRNA 195 | 195 | CCAUGACAACCAUGCAAGG | 2642 | CCUUGCAUGGUUGUCAUGG |
| siRNA 196 | 196 | CAUGACAACCAUGCAAGGA | 2643 | UCCUUGCAUGGUUGUCAUG |
| siRNA 197 | 197 | AUGACAACCAUGCAAGGAA | 2644 | UUCCUUGCAUGGUUGUCAU |
| siRNA 198 | 198 | UGACAACCAUGCAAGGAAU | 2645 | AUUCCUUGCAUGGUUGUCA |
| siRNA 199 | 199 | GACAACCAUGCAAGGAAUG | 2646 | CAUUCCUUGCAUGGUUGUC |
| siRNA 200 | 200 | ACAACCAUGCAAGGAAUGG | 2647 | CCAUUCCUUGCAUGGUUGU |
| siRNA 201 | 201 | CAACCAUGCAAGGAAUGGA | 2648 | UCCAUUCCUUGCAUGGUUG |
| siRNA 202 | 202 | AACCAUGCAAGGAAUGGAA | 2649 | UUCCAUUCCUUGCAUGGUU |
| siRNA 203 | 203 | ACCAUGCAAGGAAUGGAAC | 2650 | GUUCCAUUCCUUGCAUGGU |
| siRNA 204 | 204 | CCAUGCAAGGAAUGGAACA | 2651 | UGUUCCAUUCCUUGCAUGG |
| siRNA 205 | 205 | CAUGCAAGGAAUGGAACAG | 2652 | CUGUUCCAUUCCUUGCAUG |
| siRNA 206 | 206 | AUGCAAGGAAUGGAACAGA | 2653 | UCUGUUCCAUUCCUUGCAU |
| siRNA 207 | 207 | UGCAAGGAAUGGAACAGAC | 2654 | GUCUGUUCCAUUCCUUGCA |
| siRNA 208 | 208 | GCAAGGAAUGGAACAGACC | 2655 | GGUCUGUUCCAUUCCUUGC |
| siRNA 209 | 209 | CAAGGAAUGGAACAGACCA | 2656 | UGGUCUGUUCCAUUCCUUG |
| siRNA 210 | 210 | AAGGAAUGGAACAGACCAC | 2657 | GUGGUCUGUUCCAUUCCUU |
| siRNA 211 | 211 | AGGAAUGGAACAGACCACU | 2658 | AGUGGUCUGUUCCAUUCCU |
| siRNA 212 | 212 | GGAAUGGAACAGACCACUC | 2659 | GAGUGGUCUGUUCCAUUCC |
| siRNA 213 | 213 | GAAUGGAACAGACCACUCC | 2660 | GGAGUGGUCUGUUCCAUUC |
| siRNA 214 | 214 | AAUGGAACAGACCACUCCA | 2661 | UGGAGUGGUCUGUUCCAUU |
| siRNA 215 | 215 | AUGGAACAGACCACUCCAG | 2662 | CUGGAGUGGUCUGUUCCAU |
| siRNA 216 | 216 | UGGAACAGACCACUCCAGG | 2663 | CCUGGAGUGGUCUGUUCCA |
| siRNA 217 | 217 | GGAACAGACCACUCCAGGG | 2664 | CCCUGGAGUGGUCUGUUCC |
| siRNA 218 | 218 | GAACAGACCACUCCAGGGG | 2665 | CCCCUGGAGUGGUCUGUUC |
| siRNA 219 | 219 | AACAGACCACUCCAGGGGC | 2666 | GCCCCUGGAGUGGUCUGUU |
| siRNA 220 | 220 | ACAGACCACUCCAGGGGCU | 2667 | AGCCCCUGGAGUGGUCUGU |
| siRNA 221 | 221 | CAGACCACUCCAGGGGCUG | 2668 | CAGCCCCUGGAGUGGUCUG |
| siRNA 222 | 222 | AGACCACUCCAGGGGCUGG | 2669 | CCAGCCCCUGGAGUGGUCU |
| siRNA 223 | 223 | GACCACUCCAGGGGCUGGC | 2670 | GCCAGCCCCUGGAGUGGUC |
| siRNA 224 | 224 | ACCACUCCAGGGGCUGGCC | 2671 | GGCCAGCCCCUGGAGUGGU |
| siRNA 225 | 225 | CCACUCCAGGGGCUGGCCC | 2672 | GGGCCAGCCCCUGGAGUGG |
| siRNA 226 | 226 | CACUCCAGGGGCUGGCCCU | 2673 | AGGGCCAGCCCCUGGAGUG |
| siRNA 227 | 227 | ACUCCAGGGGCUGGCCCUG | 2674 | CAGGGCCAGCCCCUGGAGU |
| siRNA 228 | 228 | CUCCAGGGGCUGGCCCUGA | 2675 | UCAGGGCCAGCCCCUGGAG |
| siRNA 229 | 229 | UCCAGGGGCUGGCCCUGAU | 2676 | AUCAGGGCCAGCCCCUGGA |
| siRNA 230 | 230 | CCAGGGGCUGGCCCUGAUG | 2677 | CAUCAGGGCCAGCCCCUGG |
| siRNA 231 | 231 | CAGGGGCUGGCCCUGAUGU | 2678 | ACAUCAGGGCCAGCCCCUG |
| siRNA 232 | 232 | AGGGGCUGGCCCUGAUGUG | 2679 | CACAUCAGGGCCAGCCCCU |
| siRNA 233 | 233 | GGGGCUGGCCCUGAUGUGC | 2680 | GCACAUCAGGGCCAGCCCC |
| siRNA 234 | 234 | GGGCUGGCCCUGAUGUGCC | 2681 | GGCACAUCAGGGCCAGCCC |
| siRNA 235 | 235 | GGCUGGCCCUGAUGUGCCC | 2682 | GGGCACAUCAGGGCCAGCC |
| siRNA 236 | 236 | GCUGGCCCUGAUGUGCCCC | 2683 | GGGGCACAUCAGGGCCAGC |
| siRNA 237 | 237 | CUGGCCCUGAUGUGCCCCA | 2684 | UGGGGCACAUCAGGGCCAG |
| siRNA 238 | 238 | UGGCCCUGAUGUGCCCCAG | 2685 | CUGGGGCACAUCAGGGCCA |
| siRNA 239 | 239 | GGCCCUGAUGUGCCCCAGC | 2686 | GCUGGGGCACAUCAGGGCC |
| siRNA 240 | 240 | GCCCUGAUGUGCCCCAGCU | 2687 | AGCUGGGGCACAUCAGGGC |
| siRNA 241 | 241 | CCCUGAUGUGCCCCAGCUG | 2688 | CAGCUGGGGCACAUCAGGG |
| siRNA 242 | 242 | CCUGAUGUGCCCCAGCUGG | 2689 | CCAGCUGGGGCACAUCAGG |
| siRNA 243 | 243 | CUGAUGUGCCCCAGCUGGG | 2690 | CCCAGCUGGGGCACAUCAG |
| siRNA 244 | 244 | UGAUGUGCCCCAGCUGGGA | 2691 | UCCCAGCUGGGGCACAUCA |
| siRNA 245 | 245 | GAUGUGCCCCAGCUGGGAA | 2692 | UUCCCAGCUGGGGCACAUC |
| siRNA 246 | 246 | AUGUGCCCCAGCUGGGAAA | 2693 | UUUCCCAGCUGGGGCACAU |
| siRNA 247 | 247 | UGUGCCCCAGCUGGGAAAC | 2694 | GUUUCCCAGCUGGGGCACA |
| siRNA 248 | 248 | GUGCCCCAGCUGGGAAACA | 2695 | UGUUUCCCAGCUGGGGCAC |
| siRNA 249 | 249 | UGCCCCAGCUGGGAAACAU | 2696 | AUGUUUCCCAGCUGGGGCA |
| siRNA 250 | 250 | GCCCCAGCUGGGAAACAUA | 2697 | UAUGUUUCCCAGCUGGGGC |
| siRNA 251 | 251 | CCCCAGCUGGGAAACAUAG | 2698 | CUAUGUUUCCCAGCUGGGG |
| siRNA 252 | 252 | CCCAGCUGGGAAACAUAGA | 2699 | UCUAUGUUUCCCAGCUGGG |
| siRNA 253 | 253 | CCAGCUGGGAAACAUAGAU | 2700 | AUCUAUGUUUCCCAGCUGG |
| siRNA 254 | 254 | CAGCUGGGAAACAUAGAUG | 2701 | CAUCUAUGUUUCCCAGCUG |
| siRNA 255 | 255 | AGCUGGGAAACAUAGAUGU | 2702 | ACAUCUAUGUUUCCCAGCU |
| siRNA 256 | 256 | GCUGGGAAACAUAGAUGUC | 2703 | GACAUCUAUGUUUCCCAGC |
| siRNA 257 | 257 | CUGGGAAACAUAGAUGUCA | 2704 | UGACAUCUAUGUUUCCCAG |
| siRNA 258 | 258 | UGGGAAACAUAGAUGUCAU | 2705 | AUGACAUCUAUGUUUCCCA |
| siRNA 259 | 259 | GGGAAACAUAGAUGUCAUA | 2706 | UAUGACAUCUAUGUUUCCC |
| siRNA 260 | 260 | GGAAACAUAGAUGUCAUAC | 2707 | GUAUGACAUCUAUGUUUCC |
| siRNA 261 | 261 | GAAACAUAGAUGUCAUACA | 2708 | UGUAUGACAUCUAUGUUUC |
| siRNA 262 | 262 | AAACAUAGAUGUCAUACAU | 2709 | AUGUAUGACAUCUAUGUUU |
| siRNA 263 | 263 | AACAUAGAUGUCAUACAUU | 2710 | AAUGUAUGACAUCUAUGUU |
| siRNA 264 | 264 | ACAUAGAUGUCAUACAUUC | 2711 | GAAUGUAUGACAUCUAUGU |
| siRNA 265 | 265 | CAUAGAUGUCAUACAUUCA | 2712 | UGAAUGUAUGACAUCUAUG |
| siRNA 266 | 266 | AUAGAUGUCAUACAUUCAU | 2713 | AUGAAUGUAUGACAUCUAU |
| siRNA 267 | 267 | UAGAUGUCAUACAUUCAUA | 2714 | UAUGAAUGUAUGACAUCUA |
| siRNA 268 | 268 | AGAUGUCAUACAUUCAUAU | 2715 | AUAUGAAUGUAUGACAUCU |
| siRNA 269 | 269 | GAUGUCAUACAUUCAUAUC | 2716 | GAUAUGAAUGUAUGACAUC |
| siRNA 270 | 270 | AUGUCAUACAUUCAUAUCU | 2717 | AGAUAUGAAUGUAUGACAU |
| siRNA 271 | 271 | UGUCAUACAUUCAUAUCUG | 2718 | CAGAUAUGAAUGUAUGACA |
| siRNA 272 | 272 | GUCAUACAUUCAUAUCUGU | 2719 | ACAGAUAUGAAUGUAUGAC |
| siRNA 273 | 273 | UCAUACAUUCAUAUCUGUG | 2720 | CACAGAUAUGAAUGUAUGA |
| siRNA 274 | 274 | CAUACAUUCAUAUCUGUGU | 2721 | ACACAGAUAUGAAUGUAUG |
| siRNA 275 | 275 | AUACAUUCAUAUCUGUGUA | 2722 | UACACAGAUAUGAAUGUAU |
| siRNA 276 | 276 | UACAUUCAUAUCUGUGUAA | 2723 | UUACACAGAUAUGAAUGUA |
| siRNA 277 | 277 | ACAUUCAUAUCUGUGUAAA | 2724 | UUUACACAGAUAUGAAUGU |
| siRNA 278 | 278 | CAUUCAUAUCUGUGUAAAG | 2725 | CUUUACACAGAUAUGAAUG |
| siRNA 279 | 279 | AUUCAUAUCUGUGUAAAGG | 2726 | CCUUUACACAGAUAUGAAU |
| siRNA 280 | 280 | UUCAUAUCUGUGUAAAGGA | 2727 | UCCUUUACACAGAUAUGAA |
| siRNA 281 | 281 | UCAUAUCUGUGUAAAGGAU | 2728 | AUCCUUUACACAGAUAUGA |
| siRNA 282 | 282 | CAUAUCUGUGUAAAGGAUU | 2729 | AAUCCUUUACACAGAUAUG |
| siRNA 283 | 283 | AUAUCUGUGUAAAGGAUUG | 2730 | CAAUCCUUUACACAGAUAU |
| siRNA 284 | 284 | UAUCUGUGUAAAGGAUUGC | 2731 | GCAAUCCUUUACACAGAUA |
| siRNA 285 | 285 | AUCUGUGUAAAGGAUUGCA | 2732 | UGCAAUCCUUUACACAGAU |
| siRNA 286 | 286 | UCUGUGUAAAGGAUUGCAA | 2733 | UUGCAAUCCUUUACACAGA |
| siRNA 287 | 287 | CUGUGUAAAGGAUUGCAAG | 2734 | CUUGCAAUCCUUUACACAG |
| siRNA 288 | 288 | UGUGUAAAGGAUUGCAAGA | 2735 | UCUUGCAAUCCUUUACACA |
| siRNA 289 | 289 | GUGUAAAGGAUUGCAAGAG | 2736 | CUCUUGCAAUCCUUUACAC |
| siRNA 290 | 290 | UGUAAAGGAUUGCAAGAGA | 2737 | UCUCUUGCAAUCCUUUACA |
| siRNA 291 | 291 | GUAAAGGAUUGCAAGAGAA | 2738 | UUCUCUUGCAAUCCUUUAC |
| siRNA 292 | 292 | UAAAGGAUUGCAAGAGAAG | 2739 | CUUCUCUUGCAAUCCUUUA |
| siRNA 293 | 293 | AAAGGAUUGCAAGAGAAGU | 2740 | ACUUCUCUUGCAAUCCUUU |
| siRNA 294 | 294 | AAGGAUUGCAAGAGAAGUU | 2741 | AACUUCUCUUGCAAUCCUU |
| siRNA 295 | 295 | AGGAUUGCAAGAGAAGUUC | 2742 | GAACUUCUCUUGCAAUCCU |
| siRNA 296 | 296 | GGAUUGCAAGAGAAGUUCU | 2743 | AGAACUUCUCUUGCAAUCC |
| siRNA 297 | 297 | GAUUGCAAGAGAAGUUCUU | 2744 | AAGAACUUCUCUUGCAAUC |
| siRNA 298 | 298 | AUUGCAAGAGAAGUUCUUC | 2745 | GAAGAACUUCUCUUGCAAU |
| siRNA 299 | 299 | UUGCAAGAGAAGUUCUUCA | 2746 | UGAAGAACUUCUCUUGCAA |
| siRNA 300 | 300 | UGCAAGAGAAGUUCUUCAA | 2747 | UUGAAGAACUUCUCUUGCA |
| siRNA 301 | 301 | GCAAGAGAAGUUCUUCAAG | 2748 | CUUGAAGAACUUCUCUUGC |
| siRNA 302 | 302 | CAAGAGAAGUUCUUCAAGA | 2749 | UCUUGAAGAACUUCUCUUG |
| siRNA 303 | 303 | AAGAGAAGUUCUUCAAGAG | 2750 | CUCUUGAAGAACUUCUCUU |
| siRNA 304 | 304 | AGAGAAGUUCUUCAAGAGG | 2751 | CCUCUUGAAGAACUUCUCU |
| siRNA 305 | 305 | GAGAAGUUCUUCAAGAGGA | 2752 | UCCUCUUGAAGAACUUCUC |
| siRNA 306 | 306 | AGAAGUUCUUCAAGAGGAA | 2753 | UUCCUCUUGAAGAACUUCU |
| siRNA 307 | 307 | GAAGUUCUUCAAGAGGAAA | 2754 | UUUCCUCUUGAAGAACUUC |
| siRNA 308 | 308 | AAGUUCUUCAAGAGGAAAC | 2755 | GUUUCCUCUUGAAGAACUU |
| siRNA 309 | 309 | AGUUCUUCAAGAGGAAACC | 2756 | GGUUUCCUCUUGAAGAACU |
| siRNA 310 | 310 | GUUCUUCAAGAGGAAACCC | 2757 | GGGUUUCCUCUUGAAGAAC |
| siRNA 311 | 311 | UUCUUCAAGAGGAAACCCA | 2758 | UGGGUUUCCUCUUGAAGAA |
| siRNA 312 | 312 | UCUUCAAGAGGAAACCCAA | 2759 | UUGGGUUUCCUCUUGAAGA |
| siRNA 313 | 313 | CUUCAAGAGGAAACCCAAA | 2760 | UUUGGGUUUCCUCUUGAAG |
| siRNA 314 | 314 | UUCAAGAGGAAACCCAAAG | 2761 | CUUUGGGUUUCCUCUUGAA |
| siRNA 315 | 315 | UCAAGAGGAAACCCAAAGU | 2762 | ACUUUGGGUUUCCUCUUGA |
| siRNA 316 | 316 | CAAGAGGAAACCCAAAGUC | 2763 | GACUUUGGGUUUCCUCUUG |
| siRNA 317 | 317 | AAGAGGAAACCCAAAGUCC | 2764 | GGACUUUGGGUUUCCUCUU |
| siRNA 318 | 318 | AGAGGAAACCCAAAGUCCU | 2765 | AGGACUUUGGGUUUCCUCU |
| siRNA 319 | 319 | GAGGAAACCCAAAGUCCUU | 2766 | AAGGACUUUGGGUUUCCUC |
| siRNA 320 | 320 | AGGAAACCCAAAGUCCUUG | 2767 | CAAGGACUUUGGGUUUCCU |
| siRNA 321 | 321 | GGAAACCCAAAGUCCUUGG | 2768 | CCAAGGACUUUGGGUUUCC |
| siRNA 322 | 322 | GAAACCCAAAGUCCUUGGG | 2769 | CCCAAGGACUUUGGGUUUC |
| siRNA 323 | 323 | AAACCCAAAGUCCUUGGGG | 2770 | CCCCAAGGACUUUGGGUUU |
| siRNA 324 | 324 | AACCCAAAGUCCUUGGGGU | 2771 | ACCCCAAGGACUUUGGGUU |
| siRNA 325 | 325 | ACCCAAAGUCCUUGGGGUU | 2772 | AACCCCAAGGACUUUGGGU |
| siRNA 326 | 326 | CCCAAAGUCCUUGGGGUUU | 2773 | AAACCCCAAGGACUUUGGG |
| siRNA 327 | 327 | CCAAAGUCCUUGGGGUUUU | 2774 | AAAACCCCAAGGACUUUGG |
| siRNA 328 | 328 | CAAAGUCCUUGGGGUUUUG | 2775 | CAAAACCCCAAGGACUUUG |
| siRNA 329 | 329 | AAAGUCCUUGGGGUUUUGU | 2776 | ACAAAACCCCAAGGACUUU |
| siRNA 330 | 330 | AAGUCCUUGGGGUUUUGUG | 2777 | CACAAAACCCCAAGGACUU |
| siRNA 331 | 331 | AGUCCUUGGGGUUUUGUGU | 2778 | ACACAAAACCCCAAGGACU |
| siRNA 332 | 332 | GUCCUUGGGGUUUUGUGUG | 2779 | CACACAAAACCCCAAGGAC |
| siRNA 333 | 333 | UCCUUGGGGUUUUGUGUGG | 2780 | CCACACAAAACCCCAAGGA |
| siRNA 334 | 334 | CCUUGGGGUUUUGUGUGGA | 2781 | UCCACACAAAACCCCAAGG |
| siRNA 335 | 335 | CUUGGGGUUUUGUGUGGAC | 2782 | GUCCACACAAAACCCCAAG |
| siRNA 336 | 336 | UUGGGGUUUUGUGUGGACA | 2783 | UGUCCACACAAAACCCCAA |
| siRNA 337 | 337 | UGGGGUUUUGUGUGGACAU | 2784 | AUGUCCACACAAAACCCCA |
| siRNA 338 | 338 | GGGGUUUUGUGUGGACAUA | 2785 | UAUGUCCACACAAAACCCC |
| siRNA 339 | 339 | GGGUUUUGUGUGGACAUAA | 2786 | UUAUGUCCACACAAAACCC |
| siRNA 340 | 340 | GGUUUUGUGUGGACAUAAG | 2787 | CUUAUGUCCACACAAAACC |
| siRNA 341 | 341 | GUUUUGUGUGGACAUAAGU | 2788 | ACUUAUGUCCACACAAAAC |
| siRNA 342 | 342 | UUUUGUGUGGACAUAAGUU | 2789 | AACUUAUGUCCACACAAAA |
| siRNA 343 | 343 | UUUGUGUGGACAUAAGUUU | 2790 | AAACUUAUGUCCACACAAA |
| siRNA 344 | 344 | UUGUGUGGACAUAAGUUUU | 2791 | AAAACUUAUGUCCACACAA |
| siRNA 345 | 345 | UGUGUGGACAUAAGUUUUC | 2792 | GAAAACUUAUGUCCACACA |
| siRNA 346 | 346 | GUGUGGACAUAAGUUUUCA | 2793 | UGAAAACUUAUGUCCACAC |
| siRNA 347 | 347 | UGUGGACAUAAGUUUUCAA | 2794 | UUGAAAACUUAUGUCCACA |
| siRNA 348 | 348 | GUGGACAUAAGUUUUCAAC | 2795 | GUUGAAAACUUAUGUCCAC |
| siRNA 349 | 349 | UGGACAUAAGUUUUCAACU | 2796 | AGUUGAAAACUUAUGUCCA |
| siRNA 350 | 350 | GGACAUAAGUUUUCAACUC | 2797 | GAGUUGAAAACUUAUGUCC |
| siRNA 351 | 351 | GACAUAAGUUUUCAACUCA | 2798 | UGAGUUGAAAACUUAUGUC |
| siRNA 352 | 352 | ACAUAAGUUUUCAACUCAU | 2799 | AUGAGUUGAAAACUUAUGU |
| siRNA 353 | 353 | CAUAAGUUUUCAACUCAUU | 2800 | AAUGAGUUGAAAACUUAUG |
| siRNA 354 | 354 | AUAAGUUUUCAACUCAUUC | 2801 | GAAUGAGUUGAAAACUUAU |
| siRNA 355 | 355 | UAAGUUUUCAACUCAUUCG | 2802 | CGAAUGAGUUGAAAACUUA |
| siRNA 356 | 356 | AAGUUUUCAACUCAUUCGG | 2803 | CCGAAUGAGUUGAAAACUU |
| siRNA 357 | 357 | AGUUUUCAACUCAUUCGGU | 2804 | ACCGAAUGAGUUGAAAACU |
| siRNA 358 | 358 | GUUUUCAACUCAUUCGGUA | 2805 | UACCGAAUGAGUUGAAAAC |
| siRNA 359 | 359 | UUUUCAACUCAUUCGGUAU | 2806 | AUACCGAAUGAGUUGAAAA |
| siRNA 360 | 360 | UUUCAACUCAUUCGGUAUC | 2807 | GAUACCGAAUGAGUUGAAA |
| siRNA 361 | 361 | UUCAACUCAUUCGGUAUCC | 2808 | GGAUACCGAAUGAGUUGAA |
| siRNA 362 | 362 | UCAACUCAUUCGGUAUCCU | 2809 | AGGAUACCGAAUGAGUUGA |
| siRNA 363 | 363 | CAACUCAUUCGGUAUCCUU | 2810 | AAGGAUACCGAAUGAGUUG |
| siRNA 364 | 364 | AACUCAUUCGGUAUCCUUA | 2811 | UAAGGAUACCGAAUGAGUU |
| siRNA 365 | 365 | ACUCAUUCGGUAUCCUUAU | 2812 | AUAAGGAUACCGAAUGAGU |
| siRNA 366 | 366 | CUCAUUCGGUAUCCUUAUC | 2813 | GAUAAGGAUACCGAAUGAG |
| siRNA 367 | 367 | UCAUUCGGUAUCCUUAUCA | 2814 | UGAUAAGGAUACCGAAUGA |
| siRNA 368 | 368 | CAUUCGGUAUCCUUAUCAG | 2815 | CUGAUAAGGAUACCGAAUG |
| siRNA 369 | 369 | AUUCGGUAUCCUUAUCAGU | 2816 | ACUGAUAAGGAUACCGAAU |
| siRNA 370 | 370 | UUCGGUAUCCUUAUCAGUU | 2817 | AACUGAUAAGGAUACCGAA |
| siRNA 371 | 371 | UCGGUAUCCUUAUCAGUUG | 2818 | CAACUGAUAAGGAUACCGA |
| siRNA 372 | 372 | CGGUAUCCUUAUCAGUUGC | 2819 | GCAACUGAUAAGGAUACCG |
| siRNA 373 | 373 | GGUAUCCUUAUCAGUUGCA | 2820 | UGCAACUGAUAAGGAUACC |
| siRNA 374 | 374 | GUAUCCUUAUCAGUUGCAG | 2821 | CUGCAACUGAUAAGGAUAC |
| siRNA 375 | 375 | UAUCCUUAUCAGUUGCAGC | 2822 | GCUGCAACUGAUAAGGAUA |
| siRNA 376 | 376 | AUCCUUAUCAGUUGCAGCA | 2823 | UGCUGCAACUGAUAAGGAU |
| siRNA 377 | 377 | UCCUUAUCAGUUGCAGCAG | 2824 | CUGCUGCAACUGAUAAGGA |
| siRNA 378 | 378 | CCUUAUCAGUUGCAGCAGG | 2825 | CCUGCUGCAACUGAUAAGG |
| siRNA 379 | 379 | CUUAUCAGUUGCAGCAGGA | 2826 | UCCUGCUGCAACUGAUAAG |
| siRNA 380 | 380 | UUAUCAGUUGCAGCAGGAA | 2827 | UUCCUGCUGCAACUGAUAA |
| siRNA 381 | 381 | UAUCAGUUGCAGCAGGAAU | 2828 | AUUCCUGCUGCAACUGAUA |
| siRNA 382 | 382 | AUCAGUUGCAGCAGGAAUU | 2829 | AAUUCCUGCUGCAACUGAU |
| siRNA 383 | 383 | UCAGUUGCAGCAGGAAUUA | 2830 | UAAUUCCUGCUGCAACUGA |
| siRNA 384 | 384 | CAGUUGCAGCAGGAAUUAG | 2831 | CUAAUUCCUGCUGCAACUG |
| siRNA 385 | 385 | AGUUGCAGCAGGAAUUAGA | 2832 | UCUAAUUCCUGCUGCAACU |
| siRNA 386 | 386 | GUUGCAGCAGGAAUUAGAA | 2833 | UUCUAAUUCCUGCUGCAAC |
| siRNA 387 | 387 | UUGCAGCAGGAAUUAGAAC | 2834 | GUUCUAAUUCCUGCUGCAA |
| siRNA 388 | 388 | UGCAGCAGGAAUUAGAACA | 2835 | UGUUCUAAUUCCUGCUGCA |
| siRNA 389 | 389 | GCAGCAGGAAUUAGAACAA | 2836 | UUGUUCUAAUUCCUGCUGC |
| siRNA 390 | 390 | CAGCAGGAAUUAGAACAAC | 2837 | GUUGUUCUAAUUCCUGCUG |
| siRNA 391 | 391 | AGCAGGAAUUAGAACAACA | 2838 | UGUUGUUCUAAUUCCUGCU |
| siRNA 392 | 392 | GCAGGAAUUAGAACAACAA | 2839 | UUGUUGUUCUAAUUCCUGC |
| siRNA 393 | 393 | CAGGAAUUAGAACAACAAA | 2840 | UUUGUUGUUCUAAUUCCUG |
| siRNA 394 | 394 | AGGAAUUAGAACAACAAAA | 2841 | UUUUGUUGUUCUAAUUCCU |
| siRNA 395 | 395 | GGAAUUAGAACAACAAAAG | 2842 | CUUUUGUUGUUCUAAUUCC |
| siRNA 396 | 396 | GAAUUAGAACAACAAAAGG | 2843 | CCUUUUGUUGUUCUAAUUC |
| siRNA 397 | 397 | AAUUAGAACAACAAAAGGU | 2844 | ACCUUUUGUUGUUCUAAUU |
| siRNA 398 | 398 | AUUAGAACAACAAAAGGUC | 2845 | GACCUUUUGUUGUUCUAAU |
| siRNA 399 | 399 | UUAGAACAACAAAAGGUCU | 2846 | AGACCUUUUGUUGUUCUAA |
| siRNA 400 | 400 | UAGAACAACAAAAGGUCUG | 2847 | CAGACCUUUUGUUGUUCUA |
| siRNA 401 | 401 | AGAACAACAAAAGGUCUGG | 2848 | CCAGACCUUUUGUUGUUCU |
| siRNA 402 | 402 | GAACAACAAAAGGUCUGGU | 2849 | ACCAGACCUUUUGUUGUUC |
| siRNA 403 | 403 | AACAACAAAAGGUCUGGUU | 2850 | AACCAGACCUUUUGUUGUU |
| siRNA 404 | 404 | ACAACAAAAGGUCUGGUUG | 2851 | CAACCAGACCUUUUGUUGU |
| siRNA 405 | 405 | CAACAAAAGGUCUGGUUGG | 2852 | CCAACCAGACCUUUUGUUG |
| siRNA 406 | 406 | AACAAAAGGUCUGGUUGGA | 2853 | UCCAACCAGACCUUUUGUU |
| siRNA 407 | 407 | ACAAAAGGUCUGGUUGGAG | 2854 | CUCCAACCAGACCUUUUGU |
| siRNA 408 | 408 | CAAAAGGUCUGGUUGGAGG | 2855 | CCUCCAACCAGACCUUUUG |
| siRNA 409 | 409 | AAAAGGUCUGGUUGGAGGU | 2856 | ACCUCCAACCAGACCUUUU |
| siRNA 410 | 410 | AAAGGUCUGGUUGGAGGUA | 2857 | UACCUCCAACCAGACCUUU |
| siRNA 411 | 411 | AAGGUCUGGUUGGAGGUAG | 2858 | CUACCUCCAACCAGACCUU |
| siRNA 412 | 412 | AGGUCUGGUUGGAGGUAGU | 2859 | ACUACCUCCAACCAGACCU |
| siRNA 413 | 413 | GGUCUGGUUGGAGGUAGUC | 2860 | GACUACCUCCAACCAGACC |
| siRNA 414 | 414 | GUCUGGUUGGAGGUAGUCU | 2861 | AGACUACCUCCAACCAGAC |
| siRNA 415 | 415 | UCUGGUUGGAGGUAGUCUA | 2862 | UAGACUACCUCCAACCAGA |
| siRNA 416 | 416 | CUGGUUGGAGGUAGUCUAG | 2863 | CUAGACUACCUCCAACCAG |
| siRNA 417 | 417 | UGGUUGGAGGUAGUCUAGG | 2864 | CCUAGACUACCUCCAACCA |
| siRNA 418 | 418 | GGUUGGAGGUAGUCUAGGA | 2865 | UCCUAGACUACCUCCAACC |
| siRNA 419 | 419 | GUUGGAGGUAGUCUAGGAA | 2866 | UUCCUAGACUACCUCCAAC |
| siRNA 420 | 420 | UUGGAGGUAGUCUAGGAAA | 2867 | UUUCCUAGACUACCUCCAA |
| siRNA 421 | 421 | UGGAGGUAGUCUAGGAAAG | 2868 | CUUUCCUAGACUACCUCCA |
| siRNA 422 | 422 | GGAGGUAGUCUAGGAAAGA | 2869 | UCUUUCCUAGACUACCUCC |
| siRNA 423 | 423 | GAGGUAGUCUAGGAAAGAA | 2870 | UUCUUUCCUAGACUACCUC |
| siRNA 424 | 424 | AGGUAGUCUAGGAAAGAAU | 2871 | AUUCUUUCCUAGACUACCU |
| siRNA 425 | 425 | GGUAGUCUAGGAAAGAAUA | 2872 | UAUUCUUUCCUAGACUACC |
| siRNA 426 | 426 | GUAGUCUAGGAAAGAAUAU | 2873 | AUAUUCUUUCCUAGACUAC |
| siRNA 427 | 427 | UAGUCUAGGAAAGAAUAUC | 2874 | GAUAUUCUUUCCUAGACUA |
| siRNA 428 | 428 | AGUCUAGGAAAGAAUAUCA | 2875 | UGAUAUUCUUUCCUAGACU |
| siRNA 429 | 429 | GUCUAGGAAAGAAUAUCAC | 2876 | GUGAUAUUCUUUCCUAGAC |
| siRNA 430 | 430 | UCUAGGAAAGAAUAUCACC | 2877 | GGUGAUAUUCUUUCCUAGA |
| siRNA 431 | 431 | CUAGGAAAGAAUAUCACCA | 2878 | UGGUGAUAUUCUUUCCUAG |
| siRNA 432 | 432 | UAGGAAAGAAUAUCACCAG | 2879 | CUGGUGAUAUUCUUUCCUA |
| siRNA 433 | 433 | AGGAAAGAAUAUCACCAGU | 2880 | ACUGGUGAUAUUCUUUCCU |
| siRNA 434 | 434 | GGAAAGAAUAUCACCAGUU | 2881 | AACUGGUGAUAUUCUUUCC |
| siRNA 435 | 435 | GAAAGAAUAUCACCAGUUC | 2882 | GAACUGGUGAUAUUCUUUC |
| siRNA 436 | 436 | AAAGAAUAUCACCAGUUCA | 2883 | UGAACUGGUGAUAUUCUUU |
| siRNA 437 | 437 | AAGAAUAUCACCAGUUCAG | 2884 | CUGAACUGGUGAUAUUCUU |
| siRNA 438 | 438 | AGAAUAUCACCAGUUCAGU | 2885 | ACUGAACUGGUGAUAUUCU |
| siRNA 439 | 439 | GAAUAUCACCAGUUCAGUC | 2886 | GACUGAACUGGUGAUAUUC |
| siRNA 440 | 440 | AAUAUCACCAGUUCAGUCU | 2887 | AGACUGAACUGGUGAUAUU |
| siRNA 441 | 441 | AUAUCACCAGUUCAGUCUU | 2888 | AAGACUGAACUGGUGAUAU |
| siRNA 442 | 442 | UAUCACCAGUUCAGUCUUG | 2889 | CAAGACUGAACUGGUGAUA |
| siRNA 443 | 443 | AUCACCAGUUCAGUCUUGG | 2890 | CCAAGACUGAACUGGUGAU |
| siRNA 444 | 444 | UCACCAGUUCAGUCUUGGC | 2891 | GCCAAGACUGAACUGGUGA |
| siRNA 445 | 445 | CACCAGUUCAGUCUUGGCU | 2892 | AGCCAAGACUGAACUGGUG |
| siRNA 446 | 446 | ACCAGUUCAGUCUUGGCUA | 2893 | UAGCCAAGACUGAACUGGU |
| siRNA 447 | 447 | CCAGUUCAGUCUUGGCUAU | 2894 | AUAGCCAAGACUGAACUGG |
| siRNA 448 | 448 | CAGUUCAGUCUUGGCUAUA | 2895 | UAUAGCCAAGACUGAACUG |
| siRNA 449 | 449 | AGUUCAGUCUUGGCUAUAU | 2896 | AUAUAGCCAAGACUGAACU |
| siRNA 450 | 450 | GUUCAGUCUUGGCUAUAUC | 2897 | GAUAUAGCCAAGACUGAAC |
| siRNA 451 | 451 | UUCAGUCUUGGCUAUAUCA | 2898 | UGAUAUAGCCAAGACUGAA |
| siRNA 452 | 452 | UCAGUCUUGGCUAUAUCAG | 2899 | CUGAUAUAGCCAAGACUGA |
| siRNA 453 | 453 | CAGUCUUGGCUAUAUCAGG | 2900 | CCUGAUAUAGCCAAGACUG |
| siRNA 454 | 454 | AGUCUUGGCUAUAUCAGGG | 2901 | CCCUGAUAUAGCCAAGACU |
| siRNA 455 | 455 | GUCUUGGCUAUAUCAGGGA | 2902 | UCCCUGAUAUAGCCAAGAC |
| siRNA 456 | 456 | UCUUGGCUAUAUCAGGGAU | 2903 | AUCCCUGAUAUAGCCAAGA |
| siRNA 457 | 457 | CUUGGCUAUAUCAGGGAUC | 2904 | GAUCCCUGAUAUAGCCAAG |
| siRNA 458 | 458 | UUGGCUAUAUCAGGGAUCU | 2905 | AGAUCCCUGAUAUAGCCAA |
| siRNA 459 | 459 | UGGCUAUAUCAGGGAUCUU | 2906 | AAGAUCCCUGAUAUAGCCA |
| siRNA 460 | 460 | GGCUAUAUCAGGGAUCUUA | 2907 | UAAGAUCCCUGAUAUAGCC |
| siRNA 461 | 461 | GCUAUAUCAGGGAUCUUAA | 2908 | UUAAGAUCCCUGAUAUAGC |
| siRNA 462 | 462 | CUAUAUCAGGGAUCUUAAU | 2909 | AUUAAGAUCCCUGAUAUAG |
| siRNA 463 | 463 | UAUAUCAGGGAUCUUAAUC | 2910 | GAUUAAGAUCCCUGAUAUA |
| siRNA 464 | 464 | AUAUCAGGGAUCUUAAUCA | 2911 | UGAUUAAGAUCCCUGAUAU |
| siRNA 465 | 465 | UAUCAGGGAUCUUAAUCAA | 2912 | UUGAUUAAGAUCCCUGAUA |
| siRNA 466 | 466 | AUCAGGGAUCUUAAUCAAU | 2913 | AUUGAUUAAGAUCCCUGAU |
| siRNA 467 | 467 | UCAGGGAUCUUAAUCAAUG | 2914 | CAUUGAUUAAGAUCCCUGA |
| siRNA 468 | 468 | CAGGGAUCUUAAUCAAUGC | 2915 | GCAUUGAUUAAGAUCCCUG |
| siRNA 469 | 469 | AGGGAUCUUAAUCAAUGCA | 2916 | UGCAUUGAUUAAGAUCCCU |
| siRNA 470 | 470 | GGGAUCUUAAUCAAUGCAA | 2917 | UUGCAUUGAUUAAGAUCCC |
| siRNA 471 | 471 | GGAUCUUAAUCAAUGCAAU | 2918 | AUUGCAUUGAUUAAGAUCC |
| siRNA 472 | 472 | GAUCUUAAUCAAUGCAAUA | 2919 | UAUUGCAUUGAUUAAGAUC |
| siRNA 473 | 473 | AUCUUAAUCAAUGCAAUAA | 2920 | UUAUUGCAUUGAUUAAGAU |
| siRNA 474 | 474 | UCUUAAUCAAUGCAAUAAG | 2921 | CUUAUUGCAUUGAUUAAGA |
| siRNA 475 | 475 | CUUAAUCAAUGCAAUAAGC | 2922 | GCUUAUUGCAUUGAUUAAG |
| siRNA 476 | 476 | UUAAUCAAUGCAAUAAGCU | 2923 | AGCUUAUUGCAUUGAUUAA |
| siRNA 477 | 477 | UAAUCAAUGCAAUAAGCUU | 2924 | AAGCUUAUUGCAUUGAUUA |
| siRNA 478 | 478 | AAUCAAUGCAAUAAGCUUG | 2925 | CAAGCUUAUUGCAUUGAUU |
| siRNA 479 | 479 | AUCAAUGCAAUAAGCUUGA | 2926 | UCAAGCUUAUUGCAUUGAU |
| siRNA 480 | 480 | UCAAUGCAAUAAGCUUGAC | 2927 | GUCAAGCUUAUUGCAUUGA |
| siRNA 481 | 481 | CAAUGCAAUAAGCUUGACG | 2928 | CGUCAAGCUUAUUGCAUUG |
| siRNA 482 | 482 | AAUGCAAUAAGCUUGACGU | 2929 | ACGUCAAGCUUAUUGCAUU |
| siRNA 483 | 483 | AUGCAAUAAGCUUGACGUU | 2930 | AACGUCAAGCUUAUUGCAU |
| siRNA 484 | 484 | UGCAAUAAGCUUGACGUUU | 2931 | AAACGUCAAGCUUAUUGCA |
| siRNA 485 | 485 | GCAAUAAGCUUGACGUUUU | 2932 | AAAACGUCAAGCUUAUUGC |
| siRNA 486 | 486 | CAAUAAGCUUGACGUUUUA | 2933 | UAAAACGUCAAGCUUAUUG |
| siRNA 487 | 487 | AAUAAGCUUGACGUUUUAU | 2934 | AUAAAACGUCAAGCUUAUU |
| siRNA 488 | 488 | AUAAGCUUGACGUUUUAUU | 2935 | AAUAAAACGUCAAGCUUAU |
| siRNA 489 | 489 | UAAGCUUGACGUUUUAUUC | 2936 | GAAUAAAACGUCAAGCUUA |
| siRNA 490 | 490 | AAGCUUGACGUUUUAUUCA | 2937 | UGAAUAAAACGUCAAGCUU |
| siRNA 491 | 491 | AGCUUGACGUUUUAUUCAU | 2938 | AUGAAUAAAACGUCAAGCU |
| siRNA 492 | 492 | GCUUGACGUUUUAUUCAUU | 2939 | AAUGAAUAAAACGUCAAGC |
| siRNA 493 | 493 | CUUGACGUUUUAUUCAUUC | 2940 | GAAUGAAUAAAACGUCAAG |
| siRNA 494 | 494 | UUGACGUUUUAUUCAUUCC | 2941 | GGAAUGAAUAAAACGUCAA |
| siRNA 495 | 495 | UGACGUUUUAUUCAUUCCG | 2942 | CGGAAUGAAUAAAACGUCA |
| siRNA 496 | 496 | GACGUUUUAUUCAUUCCGU | 2943 | ACGGAAUGAAUAAAACGUC |
| siRNA 497 | 497 | ACGUUUUAUUCAUUCCGUU | 2944 | AACGGAAUGAAUAAAACGU |
| siRNA 498 | 498 | CGUUUUAUUCAUUCCGUUA | 2945 | UAACGGAAUGAAUAAAACG |
| siRNA 499 | 499 | GUUUUAUUCAUUCCGUUAC | 2946 | GUAACGGAAUGAAUAAAAC |
| siRNA 500 | 500 | UUUUAUUCAUUCCGUUACC | 2947 | GGUAACGGAAUGAAUAAAA |
| siRNA 501 | 501 | UUUAUUCAUUCCGUUACCA | 2948 | UGGUAACGGAAUGAAUAAA |
| siRNA 502 | 502 | UUAUUCAUUCCGUUACCAU | 2949 | AUGGUAACGGAAUGAAUAA |
| siRNA 503 | 503 | UAUUCAUUCCGUUACCAUU | 2950 | AAUGGUAACGGAAUGAAUA |
| siRNA 504 | 504 | AUUCAUUCCGUUACCAUUA | 2951 | UAAUGGUAACGGAAUGAAU |
| siRNA 505 | 505 | UUCAUUCCGUUACCAUUAC | 2952 | GUAAUGGUAACGGAAUGAA |
| siRNA 506 | 506 | UCAUUCCGUUACCAUUACU | 2953 | AGUAAUGGUAACGGAAUGA |
| siRNA 507 | 507 | CAUUCCGUUACCAUUACUG | 2954 | CAGUAAUGGUAACGGAAUG |
| siRNA 508 | 508 | AUUCCGUUACCAUUACUGU | 2955 | ACAGUAAUGGUAACGGAAU |
| siRNA 509 | 509 | UUCCGUUACCAUUACUGUA | 2956 | UACAGUAAUGGUAACGGAA |
| siRNA 510 | 510 | UCCGUUACCAUUACUGUAA | 2957 | UUACAGUAAUGGUAACGGA |
| siRNA 511 | 511 | CCGUUACCAUUACUGUAAC | 2958 | GUUACAGUAAUGGUAACGG |
| siRNA 512 | 512 | CGUUACCAUUACUGUAACC | 2959 | GGUUACAGUAAUGGUAACG |
| siRNA 513 | 513 | GUUACCAUUACUGUAACCA | 2960 | UGGUUACAGUAAUGGUAAC |
| siRNA 514 | 514 | UUACCAUUACUGUAACCAC | 2961 | GUGGUUACAGUAAUGGUAA |
| siRNA 515 | 515 | UACCAUUACUGUAACCACG | 2962 | CGUGGUUACAGUAAUGGUA |
| siRNA 516 | 516 | ACCAUUACUGUAACCACGA | 2963 | UCGUGGUUACAGUAAUGGU |
| siRNA 517 | 517 | CCAUUACUGUAACCACGAU | 2964 | AUCGUGGUUACAGUAAUGG |
| siRNA 518 | 518 | CAUUACUGUAACCACGAUC | 2965 | GAUCGUGGUUACAGUAAUG |
| siRNA 519 | 519 | AUUACUGUAACCACGAUCA | 2966 | UGAUCGUGGUUACAGUAAU |
| siRNA 520 | 520 | UUACUGUAACCACGAUCAG | 2967 | CUGAUCGUGGUUACAGUAA |
| siRNA 521 | 521 | UACUGUAACCACGAUCAGU | 2968 | ACUGAUCGUGGUUACAGUA |
| siRNA 522 | 522 | ACUGUAACCACGAUCAGUU | 2969 | AACUGAUCGUGGUUACAGU |
| siRNA 523 | 523 | CUGUAACCACGAUCAGUUG | 2970 | CAACUGAUCGUGGUUACAG |
| siRNA 524 | 524 | UGUAACCACGAUCAGUUGU | 2971 | ACAACUGAUCGUGGUUACA |
| siRNA 525 | 525 | GUAACCACGAUCAGUUGUC | 2972 | GACAACUGAUCGUGGUUAC |
| siRNA 526 | 526 | UAACCACGAUCAGUUGUCA | 2973 | UGACAACUGAUCGUGGUUA |
| siRNA 527 | 527 | AACCACGAUCAGUUGUCAA | 2974 | UUGACAACUGAUCGUGGUU |
| siRNA 528 | 528 | ACCACGAUCAGUUGUCAAG | 2975 | CUUGACAACUGAUCGUGGU |
| siRNA 529 | 529 | CCACGAUCAGUUGUCAAGU | 2976 | ACUUGACAACUGAUCGUGG |
| siRNA 530 | 530 | CACGAUCAGUUGUCAAGUA | 2977 | UACUUGACAACUGAUCGUG |
| siRNA 531 | 531 | ACGAUCAGUUGUCAAGUAA | 2978 | UUACUUGACAACUGAUCGU |
| siRNA 532 | 532 | CGAUCAGUUGUCAAGUAAU | 2979 | AUUACUUGACAACUGAUCG |
| siRNA 533 | 533 | GAUCAGUUGUCAAGUAAUU | 2980 | AAUUACUUGACAACUGAUC |
| siRNA 534 | 534 | AUCAGUUGUCAAGUAAUUG | 2981 | CAAUUACUUGACAACUGAU |
| siRNA 535 | 535 | UCAGUUGUCAAGUAAUUGU | 2982 | ACAAUUACUUGACAACUGA |
| siRNA 536 | 536 | CAGUUGUCAAGUAAUUGUU | 2983 | AACAAUUACUUGACAACUG |
| siRNA 537 | 537 | AGUUGUCAAGUAAUUGUUA | 2984 | UAACAAUUACUUGACAACU |
| siRNA 538 | 538 | GUUGUCAAGUAAUUGUUAC | 2985 | GUAACAAUUACUUGACAAC |
| siRNA 539 | 539 | UUGUCAAGUAAUUGUUACA | 2986 | UGUAACAAUUACUUGACAA |
| siRNA 540 | 540 | UGUCAAGUAAUUGUUACAU | 2987 | AUGUAACAAUUACUUGACA |
| siRNA 541 | 541 | GUCAAGUAAUUGUUACAUG | 2988 | CAUGUAACAAUUACUUGAC |
| siRNA 542 | 542 | UCAAGUAAUUGUUACAUGA | 2989 | UCAUGUAACAAUUACUUGA |
| siRNA 543 | 543 | CAAGUAAUUGUUACAUGAC | 2990 | GUCAUGUAACAAUUACUUG |
| siRNA 544 | 544 | AAGUAAUUGUUACAUGACU | 2991 | AGUCAUGUAACAAUUACUU |
| siRNA 545 | 545 | AGUAAUUGUUACAUGACUA | 2992 | UAGUCAUGUAACAAUUACU |
| siRNA 546 | 546 | GUAAUUGUUACAUGACUAU | 2993 | AUAGUCAUGUAACAAUUAC |
| siRNA 547 | 547 | UAAUUGUUACAUGACUAUG | 2994 | CAUAGUCAUGUAACAAUUA |
| siRNA 548 | 548 | AAUUGUUACAUGACUAUGU | 2995 | ACAUAGUCAUGUAACAAUU |
| siRNA 549 | 549 | AUUGUUACAUGACUAUGUC | 2996 | GACAUAGUCAUGUAACAAU |
| siRNA 550 | 550 | UUGUUACAUGACUAUGUCC | 2997 | GGACAUAGUCAUGUAACAA |
| siRNA 551 | 551 | UGUUACAUGACUAUGUCCA | 2998 | UGGACAUAGUCAUGUAACA |
| siRNA 552 | 552 | GUUACAUGACUAUGUCCAU | 2999 | AUGGACAUAGUCAUGUAAC |
| siRNA 553 | 553 | UUACAUGACUAUGUCCAUU | 3000 | AAUGGACAUAGUCAUGUAA |
| siRNA 554 | 554 | UACAUGACUAUGUCCAUUU | 3001 | AAAUGGACAUAGUCAUGUA |
| siRNA 555 | 555 | ACAUGACUAUGUCCAUUUU | 3002 | AAAAUGGACAUAGUCAUGU |
| siRNA 556 | 556 | CAUGACUAUGUCCAUUUUA | 3003 | UAAAAUGGACAUAGUCAUG |
| siRNA 557 | 557 | AUGACUAUGUCCAUUUUAA | 3004 | UUAAAAUGGACAUAGUCAU |
| siRNA 558 | 558 | UGACUAUGUCCAUUUUAAU | 3005 | AUUAAAAUGGACAUAGUCA |
| siRNA 559 | 559 | GACUAUGUCCAUUUUAAUG | 3006 | CAUUAAAAUGGACAUAGUC |
| siRNA 560 | 560 | ACUAUGUCCAUUUUAAUGG | 3007 | CCAUUAAAAUGGACAUAGU |
| siRNA 561 | 561 | CUAUGUCCAUUUUAAUGGG | 3008 | CCCAUUAAAAUGGACAUAG |
| siRNA 562 | 562 | UAUGUCCAUUUUAAUGGGU | 3009 | ACCCAUUAAAAUGGACAUA |
| siRNA 563 | 563 | AUGUCCAUUUUAAUGGGUA | 3010 | UACCCAUUAAAAUGGACAU |
| siRNA 564 | 564 | UGUCCAUUUUAAUGGGUAC | 3011 | GUACCCAUUAAAAUGGACA |
| siRNA 565 | 565 | GUCCAUUUUAAUGGGUACG | 3012 | CGUACCCAUUAAAAUGGAC |
| siRNA 566 | 566 | UCCAUUUUAAUGGGUACGG | 3013 | CCGUACCCAUUAAAAUGGA |
| siRNA 567 | 567 | CCAUUUUAAUGGGUACGGA | 3014 | UCCGUACCCAUUAAAAUGG |
| siRNA 568 | 568 | CAUUUUAAUGGGUACGGAU | 3015 | AUCCGUACCCAUUAAAAUG |
| siRNA 569 | 569 | AUUUUAAUGGGUACGGAUG | 3016 | CAUCCGUACCCAUUAAAAU |
| siRNA 570 | 570 | UUUUAAUGGGUACGGAUGG | 3017 | CCAUCCGUACCCAUUAAAA |
| siRNA 571 | 571 | UUUAAUGGGUACGGAUGGC | 3018 | GCCAUCCGUACCCAUUAAA |
| siRNA 572 | 572 | UUAAUGGGUACGGAUGGCA | 3019 | UGCCAUCCGUACCCAUUAA |
| siRNA 573 | 573 | UAAUGGGUACGGAUGGCAU | 3020 | AUGCCAUCCGUACCCAUUA |
| siRNA 574 | 574 | AAUGGGUACGGAUGGCAUG | 3021 | CAUGCCAUCCGUACCCAUU |
| siRNA 575 | 575 | AUGGGUACGGAUGGCAUGG | 3022 | CCAUGCCAUCCGUACCCAU |
| siRNA 576 | 576 | UGGGUACGGAUGGCAUGGU | 3023 | ACCAUGCCAUCCGUACCCA |
| siRNA 577 | 577 | GGGUACGGAUGGCAUGGUG | 3024 | CACCAUGCCAUCCGUACCC |
| siRNA 578 | 578 | GGUACGGAUGGCAUGGUGC | 3025 | GCACCAUGCCAUCCGUACC |
| siRNA 579 | 579 | GUACGGAUGGCAUGGUGCU | 3026 | AGCACCAUGCCAUCCGUAC |
| siRNA 580 | 580 | UACGGAUGGCAUGGUGCUC | 3027 | GAGCACCAUGCCAUCCGUA |
| siRNA 581 | 581 | ACGGAUGGCAUGGUGCUCC | 3028 | GGAGCACCAUGCCAUCCGU |
| siRNA 582 | 582 | CGGAUGGCAUGGUGCUCCU | 3029 | AGGAGCACCAUGCCAUCCG |
| siRNA 583 | 583 | GGAUGGCAUGGUGCUCCUC | 3030 | GAGGAGCACCAUGCCAUCC |
| siRNA 584 | 584 | GAUGGCAUGGUGCUCCUCU | 3031 | AGAGGAGCACCAUGCCAUC |
| siRNA 585 | 585 | AUGGCAUGGUGCUCCUCUU | 3032 | AAGAGGAGCACCAUGCCAU |
| siRNA 586 | 586 | UGGCAUGGUGCUCCUCUUA | 3033 | UAAGAGGAGCACCAUGCCA |
| siRNA 587 | 587 | GGCAUGGUGCUCCUCUUAA | 3034 | UUAAGAGGAGCACCAUGCC |
| siRNA 588 | 588 | GCAUGGUGCUCCUCUUAAG | 3035 | CUUAAGAGGAGCACCAUGC |
| siRNA 589 | 589 | CAUGGUGCUCCUCUUAAGU | 3036 | ACUUAAGAGGAGCACCAUG |
| siRNA 590 | 590 | AUGGUGCUCCUCUUAAGUG | 3037 | CACUUAAGAGGAGCACCAU |
| siRNA 591 | 591 | UGGUGCUCCUCUUAAGUGU | 3038 | ACACUUAAGAGGAGCACCA |
| siRNA 592 | 592 | GGUGCUCCUCUUAAGUGUG | 3039 | CACACUUAAGAGGAGCACC |
| siRNA 593 | 593 | GUGCUCCUCUUAAGUGUGC | 3040 | GCACACUUAAGAGGAGCAC |
| siRNA 594 | 594 | UGCUCCUCUUAAGUGUGCU | 3041 | AGCACACUUAAGAGGAGCA |
| siRNA 595 | 595 | GCUCCUCUUAAGUGUGCUG | 3042 | CAGCACACUUAAGAGGAGC |
| siRNA 596 | 596 | CUCCUCUUAAGUGUGCUGG | 3043 | CCAGCACACUUAAGAGGAG |
| siRNA 597 | 597 | UCCUCUUAAGUGUGCUGGA | 3044 | UCCAGCACACUUAAGAGGA |
| siRNA 598 | 598 | CCUCUUAAGUGUGCUGGAA | 3045 | UUCCAGCACACUUAAGAGG |
| siRNA 599 | 599 | CUCUUAAGUGUGCUGGAAU | 3046 | AUUCCAGCACACUUAAGAG |
| siRNA 600 | 600 | UCUUAAGUGUGCUGGAAUU | 3047 | AAUUCCAGCACACUUAAGA |
| siRNA 601 | 601 | CUUAAGUGUGCUGGAAUUC | 3048 | GAAUUCCAGCACACUUAAG |
| siRNA 602 | 602 | UUAAGUGUGCUGGAAUUCU | 3049 | AGAAUUCCAGCACACUUAA |
| siRNA 603 | 603 | UAAGUGUGCUGGAAUUCUG | 3050 | CAGAAUUCCAGCACACUUA |
| siRNA 604 | 604 | AAGUGUGCUGGAAUUCUGC | 3051 | GCAGAAUUCCAGCACACUU |
| siRNA 605 | 605 | AGUGUGCUGGAAUUCUGCA | 3052 | UGCAGAAUUCCAGCACACU |
| siRNA 606 | 606 | GUGUGCUGGAAUUCUGCAU | 3053 | AUGCAGAAUUCCAGCACAC |
| siRNA 607 | 607 | UGUGCUGGAAUUCUGCAUU | 3054 | AAUGCAGAAUUCCAGCACA |
| siRNA 608 | 608 | GUGCUGGAAUUCUGCAUUG | 3055 | CAAUGCAGAAUUCCAGCAC |
| siRNA 609 | 609 | UGCUGGAAUUCUGCAUUGC | 3056 | GCAAUGCAGAAUUCCAGCA |
| siRNA 610 | 610 | GCUGGAAUUCUGCAUUGCU | 3057 | AGCAAUGCAGAAUUCCAGC |
| siRNA 611 | 611 | CUGGAAUUCUGCAUUGCUG | 3058 | CAGCAAUGCAGAAUUCCAG |
| siRNA 612 | 612 | UGGAAUUCUGCAUUGCUGU | 3059 | ACAGCAAUGCAGAAUUCCA |
| siRNA 613 | 613 | GGAAUUCUGCAUUGCUGUG | 3060 | CACAGCAAUGCAGAAUUCC |
| siRNA 614 | 614 | GAAUUCUGCAUUGCUGUGG | 3061 | CCACAGCAAUGCAGAAUUC |
| siRNA 615 | 615 | AAUUCUGCAUUGCUGUGGC | 3062 | GCCACAGCAAUGCAGAAUU |
| siRNA 616 | 616 | AUUCUGCAUUGCUGUGGCC | 3063 | GGCCACAGCAAUGCAGAAU |
| siRNA 617 | 617 | UUCUGCAUUGCUGUGGCCC | 3064 | GGGCCACAGCAAUGCAGAA |
| siRNA 618 | 618 | UCUGCAUUGCUGUGGCCCU | 3065 | AGGGCCACAGCAAUGCAGA |
| siRNA 619 | 619 | CUGCAUUGCUGUGGCCCUC | 3066 | GAGGGCCACAGCAAUGCAG |
| siRNA 620 | 620 | UGCAUUGCUGUGGCCCUCU | 3067 | AGAGGGCCACAGCAAUGCA |
| siRNA 621 | 621 | GCAUUGCUGUGGCCCUCUC | 3068 | GAGAGGGCCACAGCAAUGC |
| siRNA 622 | 622 | CAUUGCUGUGGCCCUCUCU | 3069 | AGAGAGGGCCACAGCAAUG |
| siRNA 623 | 623 | AUUGCUGUGGCCCUCUCUG | 3070 | CAGAGAGGGCCACAGCAAU |
| siRNA 624 | 624 | UUGCUGUGGCCCUCUCUGC | 3071 | GCAGAGAGGGCCACAGCAA |
| siRNA 625 | 625 | UGCUGUGGCCCUCUCUGCC | 3072 | GGCAGAGAGGGCCACAGCA |
| siRNA 626 | 626 | GCUGUGGCCCUCUCUGCCU | 3073 | AGGCAGAGAGGGCCACAGC |
| siRNA 627 | 627 | CUGUGGCCCUCUCUGCCUU | 3074 | AAGGCAGAGAGGGCCACAG |
| siRNA 628 | 628 | UGUGGCCCUCUCUGCCUUU | 3075 | AAAGGCAGAGAGGGCCACA |
| siRNA 629 | 629 | GUGGCCCUCUCUGCCUUUG | 3076 | CAAAGGCAGAGAGGGCCAC |
| siRNA 630 | 630 | UGGCCCUCUCUGCCUUUGG | 3077 | CCAAAGGCAGAGAGGGCCA |
| siRNA 631 | 631 | GGCCCUCUCUGCCUUUGGA | 3078 | UCCAAAGGCAGAGAGGGCC |
| siRNA 632 | 632 | GCCCUCUCUGCCUUUGGAU | 3079 | AUCCAAAGGCAGAGAGGGC |
| siRNA 633 | 633 | CCCUCUCUGCCUUUGGAUG | 3080 | CAUCCAAAGGCAGAGAGGG |
| siRNA 634 | 634 | CCUCUCUGCCUUUGGAUGU | 3081 | ACAUCCAAAGGCAGAGAGG |
| siRNA 635 | 635 | CUCUCUGCCUUUGGAUGUA | 3082 | UACAUCCAAAGGCAGAGAG |
| siRNA 636 | 636 | UCUCUGCCUUUGGAUGUAA | 3083 | UUACAUCCAAAGGCAGAGA |
| siRNA 637 | 637 | CUCUGCCUUUGGAUGUAAA | 3084 | UUUACAUCCAAAGGCAGAG |
| siRNA 638 | 638 | UCUGCCUUUGGAUGUAAAG | 3085 | CUUUACAUCCAAAGGCAGA |
| siRNA 639 | 639 | CUGCCUUUGGAUGUAAAGU | 3086 | ACUUUACAUCCAAAGGCAG |
| siRNA 640 | 640 | UGCCUUUGGAUGUAAAGUG | 3087 | CACUUUACAUCCAAAGGCA |
| siRNA 641 | 641 | GCCUUUGGAUGUAAAGUGC | 3088 | GCACUUUACAUCCAAAGGC |
| siRNA 642 | 642 | CCUUUGGAUGUAAAGUGCU | 3089 | AGCACUUUACAUCCAAAGG |
| siRNA 643 | 643 | CUUUGGAUGUAAAGUGCUU | 3090 | AAGCACUUUACAUCCAAAG |
| siRNA 644 | 644 | UUUGGAUGUAAAGUGCUUU | 3091 | AAAGCACUUUACAUCCAAA |
| siRNA 645 | 645 | UUGGAUGUAAAGUGCUUUG | 3092 | CAAAGCACUUUACAUCCAA |
| siRNA 646 | 646 | UGGAUGUAAAGUGCUUUGU | 3093 | ACAAAGCACUUUACAUCCA |
| siRNA 647 | 647 | GGAUGUAAAGUGCUUUGUU | 3094 | AACAAAGCACUUUACAUCC |
| siRNA 648 | 648 | GAUGUAAAGUGCUUUGUUG | 3095 | CAACAAAGCACUUUACAUC |
| siRNA 649 | 649 | AUGUAAAGUGCUUUGUUGU | 3096 | ACAACAAAGCACUUUACAU |
| siRNA 650 | 650 | UGUAAAGUGCUUUGUUGUA | 3097 | UACAACAAAGCACUUUACA |
| siRNA 651 | 651 | GUAAAGUGCUUUGUUGUAG | 3098 | CUACAACAAAGCACUUUAC |
| siRNA 652 | 652 | UAAAGUGCUUUGUUGUAGC | 3099 | GCUACAACAAAGCACUUUA |
| siRNA 653 | 653 | AAAGUGCUUUGUUGUAGCC | 3100 | GGCUACAACAAAGCACUUU |
| siRNA 654 | 654 | AAGUGCUUUGUUGUAGCCC | 3101 | GGGCUACAACAAAGCACUU |
| siRNA 655 | 655 | AGUGCUUUGUUGUAGCCCC | 3102 | GGGGCUACAACAAAGCACU |
| siRNA 656 | 656 | GUGCUUUGUUGUAGCCCCA | 3103 | UGGGGCUACAACAAAGCAC |
| siRNA 657 | 657 | UGCUUUGUUGUAGCCCCAG | 3104 | CUGGGGCUACAACAAAGCA |
| siRNA 658 | 658 | GCUUUGUUGUAGCCCCAGU | 3105 | ACUGGGGCUACAACAAAGC |
| siRNA 659 | 659 | CUUUGUUGUAGCCCCAGUG | 3106 | CACUGGGGCUACAACAAAG |
| siRNA 660 | 660 | UUUGUUGUAGCCCCAGUGA | 3107 | UCACUGGGGCUACAACAAA |
| siRNA 661 | 661 | UUGUUGUAGCCCCAGUGAG | 3108 | CUCACUGGGGCUACAACAA |
| siRNA 662 | 662 | UGUUGUAGCCCCAGUGAGA | 3109 | UCUCACUGGGGCUACAACA |
| siRNA 663 | 663 | GUUGUAGCCCCAGUGAGAG | 3110 | CUCUCACUGGGGCUACAAC |
| siRNA 664 | 664 | UUGUAGCCCCAGUGAGAGC | 3111 | GCUCUCACUGGGGCUACAA |
| siRNA 665 | 665 | UGUAGCCCCAGUGAGAGCA | 3112 | UGCUCUCACUGGGGCUACA |
| siRNA 666 | 666 | GUAGCCCCAGUGAGAGCAA | 3113 | UUGCUCUCACUGGGGCUAC |
| siRNA 667 | 667 | UAGCCCCAGUGAGAGCAAA | 3114 | UUUGCUCUCACUGGGGCUA |
| siRNA 668 | 668 | AGCCCCAGUGAGAGCAAAA | 3115 | UUUUGCUCUCACUGGGGCU |
| siRNA 669 | 669 | GCCCCAGUGAGAGCAAAAA | 3116 | UUUUUGCUCUCACUGGGGC |
| siRNA 670 | 670 | CCCCAGUGAGAGCAAAAAU | 3117 | AUUUUUGCUCUCACUGGGG |
| siRNA 671 | 671 | CCCAGUGAGAGCAAAAAUA | 3118 | UAUUUUUGCUCUCACUGGG |
| siRNA 672 | 672 | CCAGUGAGAGCAAAAAUAA | 3119 | UUAUUUUUGCUCUCACUGG |
| siRNA 673 | 673 | CAGUGAGAGCAAAAAUAAA | 3120 | UUUAUUUUUGCUCUCACUG |
| siRNA 674 | 674 | AGUGAGAGCAAAAAUAAAA | 3121 | UUUUAUUUUUGCUCUCACU |
| siRNA 675 | 675 | GUGAGAGCAAAAAUAAAAU | 3122 | AUUUUAUUUUUGCUCUCAC |
| siRNA 676 | 676 | UGAGAGCAAAAAUAAAAUU | 3123 | AAUUUUAUUUUUGCUCUCA |
| siRNA 677 | 677 | GAGAGCAAAAAUAAAAUUA | 3124 | UAAUUUUAUUUUUGCUCUC |
| siRNA 678 | 678 | AGAGCAAAAAUAAAAUUAG | 3125 | CUAAUUUUAUUUUUGCUCU |
| siRNA 679 | 679 | GAGCAAAAAUAAAAUUAGA | 3126 | UCUAAUUUUAUUUUUGCUC |
| siRNA 680 | 680 | AGCAAAAAUAAAAUUAGAA | 3127 | UUCUAAUUUUAUUUUUGCU |
| siRNA 681 | 681 | GCAAAAAUAAAAUUAGAAG | 3128 | CUUCUAAUUUUAUUUUUGC |
| siRNA 682 | 682 | CAAAAAUAAAAUUAGAAGC | 3129 | GCUUCUAAUUUUAUUUUUG |
| siRNA 683 | 683 | AAAAAUAAAAUUAGAAGCA | 3130 | UGCUUCUAAUUUUAUUUUU |
| siRNA 684 | 684 | AAAAUAAAAUUAGAAGCAA | 3131 | UUGCUUCUAAUUUUAUUUU |
| siRNA 685 | 685 | AAAUAAAAUUAGAAGCAAU | 3132 | AUUGCUUCUAAUUUUAUUU |
| siRNA 686 | 686 | AAUAAAAUUAGAAGCAAUA | 3133 | UAUUGCUUCUAAUUUUAUU |
| siRNA 687 | 687 | AUAAAAUUAGAAGCAAUAC | 3134 | GUAUUGCUUCUAAUUUUAU |
| siRNA 688 | 688 | UAAAAUUAGAAGCAAUACU | 3135 | AGUAUUGCUUCUAAUUUUA |
| siRNA 689 | 689 | AAAAUUAGAAGCAAUACUU | 3136 | AAGUAUUGCUUCUAAUUUU |
| siRNA 690 | 690 | AAAUUAGAAGCAAUACUUU | 3137 | AAAGUAUUGCUUCUAAUUU |
| siRNA 691 | 691 | AAUUAGAAGCAAUACUUUC | 3138 | GAAAGUAUUGCUUCUAAUU |
| siRNA 692 | 692 | AUUAGAAGCAAUACUUUCA | 3139 | UGAAAGUAUUGCUUCUAAU |
| siRNA 693 | 693 | UUAGAAGCAAUACUUUCAU | 3140 | AUGAAAGUAUUGCUUCUAA |
| siRNA 694 | 694 | UAGAAGCAAUACUUUCAUG | 3141 | CAUGAAAGUAUUGCUUCUA |
| siRNA 695 | 695 | AGAAGCAAUACUUUCAUGU | 3142 | ACAUGAAAGUAUUGCUUCU |
| siRNA 696 | 696 | GAAGCAAUACUUUCAUGUG | 3143 | CACAUGAAAGUAUUGCUUC |
| siRNA 697 | 697 | AAGCAAUACUUUCAUGUGC | 3144 | GCACAUGAAAGUAUUGCUU |
| siRNA 698 | 698 | AGCAAUACUUUCAUGUGCU | 3145 | AGCACAUGAAAGUAUUGCU |
| siRNA 699 | 699 | GCAAUACUUUCAUGUGCUA | 3146 | UAGCACAUGAAAGUAUUGC |
| siRNA 700 | 700 | CAAUACUUUCAUGUGCUAC | 3147 | GUAGCACAUGAAAGUAUUG |
| siRNA 701 | 701 | AAUACUUUCAUGUGCUACC | 3148 | GGUAGCACAUGAAAGUAUU |
| siRNA 702 | 702 | AUACUUUCAUGUGCUACCU | 3149 | AGGUAGCACAUGAAAGUAU |
| siRNA 703 | 703 | UACUUUCAUGUGCUACCUC | 3150 | GAGGUAGCACAUGAAAGUA |
| siRNA 704 | 704 | ACUUUCAUGUGCUACCUCC | 3151 | GGAGGUAGCACAUGAAAGU |
| siRNA 705 | 705 | CUUUCAUGUGCUACCUCCU | 3152 | AGGAGGUAGCACAUGAAAG |
| siRNA 706 | 706 | UUUCAUGUGCUACCUCCUU | 3153 | AAGGAGGUAGCACAUGAAA |
| siRNA 707 | 707 | UUCAUGUGCUACCUCCUUU | 3154 | AAAGGAGGUAGCACAUGAA |
| siRNA 708 | 708 | UCAUGUGCUACCUCCUUUC | 3155 | GAAAGGAGGUAGCACAUGA |
| siRNA 709 | 709 | CAUGUGCUACCUCCUUUCU | 3156 | AGAAAGGAGGUAGCACAUG |
| siRNA 710 | 710 | AUGUGCUACCUCCUUUCUA | 3157 | UAGAAAGGAGGUAGCACAU |
| siRNA 711 | 711 | UGUGCUACCUCCUUUCUAU | 3158 | AUAGAAAGGAGGUAGCACA |
| siRNA 712 | 712 | GUGCUACCUCCUUUCUAUU | 3159 | AAUAGAAAGGAGGUAGCAC |
| siRNA 713 | 713 | UGCUACCUCCUUUCUAUUC | 3160 | GAAUAGAAAGGAGGUAGCA |
| siRNA 714 | 714 | GCUACCUCCUUUCUAUUCA | 3161 | UGAAUAGAAAGGAGGUAGC |
| siRNA 715 | 715 | CUACCUCCUUUCUAUUCAG | 3162 | CUGAAUAGAAAGGAGGUAG |
| siRNA 716 | 716 | UACCUCCUUUCUAUUCAGA | 3163 | UCUGAAUAGAAAGGAGGUA |
| siRNA 717 | 717 | ACCUCCUUUCUAUUCAGAU | 3164 | AUCUGAAUAGAAAGGAGGU |
| siRNA 718 | 718 | CCUCCUUUCUAUUCAGAUG | 3165 | CAUCUGAAUAGAAAGGAGG |
| siRNA 719 | 719 | CUCCUUUCUAUUCAGAUGC | 3166 | GCAUCUGAAUAGAAAGGAG |
| siRNA 720 | 720 | UCCUUUCUAUUCAGAUGCA | 3167 | UGCAUCUGAAUAGAAAGGA |
| siRNA 721 | 721 | CCUUUCUAUUCAGAUGCAA | 3168 | UUGCAUCUGAAUAGAAAGG |
| siRNA 722 | 722 | CUUUCUAUUCAGAUGCAAU | 3169 | AUUGCAUCUGAAUAGAAAG |
| siRNA 723 | 723 | UUUCUAUUCAGAUGCAAUA | 3170 | UAUUGCAUCUGAAUAGAAA |
| siRNA 724 | 724 | UUCUAUUCAGAUGCAAUAU | 3171 | AUAUUGCAUCUGAAUAGAA |
| siRNA 725 | 725 | UCUAUUCAGAUGCAAUAUG | 3172 | CAUAUUGCAUCUGAAUAGA |
| siRNA 726 | 726 | CUAUUCAGAUGCAAUAUGA | 3173 | UCAUAUUGCAUCUGAAUAG |
| siRNA 727 | 727 | UAUUCAGAUGCAAUAUGAU | 3174 | AUCAUAUUGCAUCUGAAUA |
| siRNA 728 | 728 | AUUCAGAUGCAAUAUGAUG | 3175 | CAUCAUAUUGCAUCUGAAU |
| siRNA 729 | 729 | UUCAGAUGCAAUAUGAUGG | 3176 | CCAUCAUAUUGCAUCUGAA |
| siRNA 730 | 730 | UCAGAUGCAAUAUGAUGGA | 3177 | UCCAUCAUAUUGCAUCUGA |
| siRNA 731 | 731 | CAGAUGCAAUAUGAUGGAA | 3178 | UUCCAUCAUAUUGCAUCUG |
| siRNA 732 | 732 | AGAUGCAAUAUGAUGGAAA | 3179 | UUUCCAUCAUAUUGCAUCU |
| siRNA 733 | 733 | GAUGCAAUAUGAUGGAAAG | 3180 | CUUUCCAUCAUAUUGCAUC |
| siRNA 734 | 734 | AUGCAAUAUGAUGGAAAGA | 3181 | UCUUUCCAUCAUAUUGCAU |
| siRNA 735 | 735 | UGCAAUAUGAUGGAAAGAG | 3182 | CUCUUUCCAUCAUAUUGCA |
| siRNA 736 | 736 | GCAAUAUGAUGGAAAGAGA | 3183 | UCUCUUUCCAUCAUAUUGC |
| siRNA 737 | 737 | CAAUAUGAUGGAAAGAGAC | 3184 | GUCUCUUUCCAUCAUAUUG |
| siRNA 738 | 738 | AAUAUGAUGGAAAGAGACU | 3185 | AGUCUCUUUCCAUCAUAUU |
| siRNA 739 | 739 | AUAUGAUGGAAAGAGACUA | 3186 | UAGUCUCUUUCCAUCAUAU |
| siRNA 740 | 740 | UAUGAUGGAAAGAGACUAA | 3187 | UUAGUCUCUUUCCAUCAUA |
| siRNA 741 | 741 | AUGAUGGAAAGAGACUAAA | 3188 | UUUAGUCUCUUUCCAUCAU |
| siRNA 742 | 742 | UGAUGGAAAGAGACUAAAU | 3189 | AUUUAGUCUCUUUCCAUCA |
| siRNA 743 | 743 | GAUGGAAAGAGACUAAAUG | 3190 | CAUUUAGUCUCUUUCCAUC |
| siRNA 744 | 744 | AUGGAAAGAGACUAAAUGU | 3191 | ACAUUUAGUCUCUUUCCAU |
| siRNA 745 | 745 | UGGAAAGAGACUAAAUGUU | 3192 | AACAUUUAGUCUCUUUCCA |
| siRNA 746 | 746 | GGAAAGAGACUAAAUGUUG | 3193 | CAACAUUUAGUCUCUUUCC |
| siRNA 747 | 747 | GAAAGAGACUAAAUGUUGA | 3194 | UCAACAUUUAGUCUCUUUC |
| siRNA 748 | 748 | AAAGAGACUAAAUGUUGAU | 3195 | AUCAACAUUUAGUCUCUUU |
| siRNA 749 | 749 | AAGAGACUAAAUGUUGAUG | 3196 | CAUCAACAUUUAGUCUCUU |
| siRNA 750 | 750 | AGAGACUAAAUGUUGAUGU | 3197 | ACAUCAACAUUUAGUCUCU |
| siRNA 751 | 751 | GAGACUAAAUGUUGAUGUC | 3198 | GACAUCAACAUUUAGUCUC |
| siRNA 752 | 752 | AGACUAAAUGUUGAUGUCG | 3199 | CGACAUCAACAUUUAGUCU |
| siRNA 753 | 753 | GACUAAAUGUUGAUGUCGA | 3200 | UCGACAUCAACAUUUAGUC |
| siRNA 754 | 754 | ACUAAAUGUUGAUGUCGAC | 3201 | GUCGACAUCAACAUUUAGU |
| siRNA 755 | 755 | CUAAAUGUUGAUGUCGACA | 3202 | UGUCGACAUCAACAUUUAG |
| siRNA 756 | 756 | UAAAUGUUGAUGUCGACAG | 3203 | CUGUCGACAUCAACAUUUA |
| siRNA 757 | 757 | AAAUGUUGAUGUCGACAGU | 3204 | ACUGUCGACAUCAACAUUU |
| siRNA 758 | 758 | AAUGUUGAUGUCGACAGUA | 3205 | UACUGUCGACAUCAACAUU |
| siRNA 759 | 759 | AUGUUGAUGUCGACAGUAC | 3206 | GUACUGUCGACAUCAACAU |
| siRNA 760 | 760 | UGUUGAUGUCGACAGUACU | 3207 | AGUACUGUCGACAUCAACA |
| siRNA 761 | 761 | GUUGAUGUCGACAGUACUG | 3208 | CAGUACUGUCGACAUCAAC |
| siRNA 762 | 762 | UUGAUGUCGACAGUACUGU | 3209 | ACAGUACUGUCGACAUCAA |
| siRNA 763 | 763 | UGAUGUCGACAGUACUGUA | 3210 | UACAGUACUGUCGACAUCA |
| siRNA 764 | 764 | GAUGUCGACAGUACUGUAU | 3211 | AUACAGUACUGUCGACAUC |
| siRNA 765 | 765 | AUGUCGACAGUACUGUAUG | 3212 | CAUACAGUACUGUCGACAU |
| siRNA 766 | 766 | UGUCGACAGUACUGUAUGG | 3213 | CCAUACAGUACUGUCGACA |
| siRNA 767 | 767 | GUCGACAGUACUGUAUGGU | 3214 | ACCAUACAGUACUGUCGAC |
| siRNA 768 | 768 | UCGACAGUACUGUAUGGUG | 3215 | CACCAUACAGUACUGUCGA |
| siRNA 769 | 769 | CGACAGUACUGUAUGGUGC | 3216 | GCACCAUACAGUACUGUCG |
| siRNA 770 | 770 | GACAGUACUGUAUGGUGCU | 3217 | AGCACCAUACAGUACUGUC |
| siRNA 771 | 771 | ACAGUACUGUAUGGUGCUC | 3218 | GAGCACCAUACAGUACUGU |
| siRNA 772 | 772 | CAGUACUGUAUGGUGCUCC | 3219 | GGAGCACCAUACAGUACUG |
| siRNA 773 | 773 | AGUACUGUAUGGUGCUCCG | 3220 | CGGAGCACCAUACAGUACU |
| siRNA 774 | 774 | GUACUGUAUGGUGCUCCGG | 3221 | CCGGAGCACCAUACAGUAC |
| siRNA 775 | 775 | UACUGUAUGGUGCUCCGGA | 3222 | UCCGGAGCACCAUACAGUA |
| siRNA 776 | 776 | ACUGUAUGGUGCUCCGGAG | 3223 | CUCCGGAGCACCAUACAGU |
| siRNA 777 | 777 | CUGUAUGGUGCUCCGGAGA | 3224 | UCUCCGGAGCACCAUACAG |
| siRNA 778 | 778 | UGUAUGGUGCUCCGGAGAU | 3225 | AUCUCCGGAGCACCAUACA |
| siRNA 779 | 779 | GUAUGGUGCUCCGGAGAUG | 3226 | CAUCUCCGGAGCACCAUAC |
| siRNA 780 | 780 | UAUGGUGCUCCGGAGAUGG | 3227 | CCAUCUCCGGAGCACCAUA |
| siRNA 781 | 781 | AUGGUGCUCCGGAGAUGGA | 3228 | UCCAUCUCCGGAGCACCAU |
| siRNA 782 | 782 | UGGUGCUCCGGAGAUGGAC | 3229 | GUCCAUCUCCGGAGCACCA |
| siRNA 783 | 783 | GGUGCUCCGGAGAUGGACA | 3230 | UGUCCAUCUCCGGAGCACC |
| siRNA 784 | 784 | GUGCUCCGGAGAUGGACAG | 3231 | CUGUCCAUCUCCGGAGCAC |
| siRNA 785 | 785 | UGCUCCGGAGAUGGACAGU | 3232 | ACUGUCCAUCUCCGGAGCA |
| siRNA 786 | 786 | GCUCCGGAGAUGGACAGUA | 3233 | UACUGUCCAUCUCCGGAGC |
| siRNA 787 | 787 | CUCCGGAGAUGGACAGUAU | 3234 | AUACUGUCCAUCUCCGGAG |
| siRNA 788 | 788 | UCCGGAGAUGGACAGUAUC | 3235 | GAUACUGUCCAUCUCCGGA |
| siRNA 789 | 789 | CCGGAGAUGGACAGUAUCU | 3236 | AGAUACUGUCCAUCUCCGG |
| siRNA 790 | 790 | CGGAGAUGGACAGUAUCUG | 3237 | CAGAUACUGUCCAUCUCCG |
| siRNA 791 | 791 | GGAGAUGGACAGUAUCUGG | 3238 | CCAGAUACUGUCCAUCUCC |
| siRNA 792 | 792 | GAGAUGGACAGUAUCUGGA | 3239 | UCCAGAUACUGUCCAUCUC |
| siRNA 793 | 793 | AGAUGGACAGUAUCUGGAA | 3240 | UUCCAGAUACUGUCCAUCU |
| siRNA 794 | 794 | GAUGGACAGUAUCUGGAAA | 3241 | UUUCCAGAUACUGUCCAUC |
| siRNA 795 | 795 | AUGGACAGUAUCUGGAAAA | 3242 | UUUUCCAGAUACUGUCCAU |
| siRNA 796 | 796 | UGGACAGUAUCUGGAAAAA | 3243 | UUUUUCCAGAUACUGUCCA |
| siRNA 797 | 797 | GGACAGUAUCUGGAAAAAG | 3244 | CUUUUUCCAGAUACUGUCC |
| siRNA 798 | 798 | GACAGUAUCUGGAAAAAGU | 3245 | ACUUUUUCCAGAUACUGUC |
| siRNA 799 | 799 | ACAGUAUCUGGAAAAAGUC | 3246 | GACUUUUUCCAGAUACUGU |
| siRNA 800 | 800 | CAGUAUCUGGAAAAAGUCU | 3247 | AGACUUUUUCCAGAUACUG |
| siRNA 801 | 801 | AGUAUCUGGAAAAAGUCUA | 3248 | UAGACUUUUUCCAGAUACU |
| siRNA 802 | 802 | GUAUCUGGAAAAAGUCUAU | 3249 | AUAGACUUUUUCCAGAUAC |
| siRNA 803 | 803 | UAUCUGGAAAAAGUCUAUU | 3250 | AAUAGACUUUUUCCAGAUA |
| siRNA 804 | 804 | AUCUGGAAAAAGUCUAUUA | 3251 | UAAUAGACUUUUUCCAGAU |
| siRNA 805 | 805 | UCUGGAAAAAGUCUAUUAU | 3252 | AUAAUAGACUUUUUCCAGA |
| siRNA 806 | 806 | CUGGAAAAAGUCUAUUAUG | 3253 | CAUAAUAGACUUUUUCCAG |
| siRNA 807 | 807 | UGGAAAAAGUCUAUUAUGA | 3254 | UCAUAAUAGACUUUUUCCA |
| siRNA 808 | 808 | GGAAAAAGUCUAUUAUGAC | 3255 | GUCAUAAUAGACUUUUUCC |
| siRNA 809 | 809 | GAAAAAGUCUAUUAUGACA | 3256 | UGUCAUAAUAGACUUUUUC |
| siRNA 810 | 810 | AAAAAGUCUAUUAUGACAU | 3257 | AUGUCAUAAUAGACUUUUU |
| siRNA 811 | 811 | AAAAGUCUAUUAUGACAUU | 3258 | AAUGUCAUAAUAGACUUUU |
| siRNA 812 | 812 | AAAGUCUAUUAUGACAUUC | 3259 | GAAUGUCAUAAUAGACUUU |
| siRNA 813 | 813 | AAGUCUAUUAUGACAUUCU | 3260 | AGAAUGUCAUAAUAGACUU |
| siRNA 814 | 814 | AGUCUAUUAUGACAUUCUA | 3261 | UAGAAUGUCAUAAUAGACU |
| siRNA 815 | 815 | GUCUAUUAUGACAUUCUAU | 3262 | AUAGAAUGUCAUAAUAGAC |
| siRNA 816 | 816 | UCUAUUAUGACAUUCUAUC | 3263 | GAUAGAAUGUCAUAAUAGA |
| siRNA 817 | 817 | CUAUUAUGACAUUCUAUCU | 3264 | AGAUAGAAUGUCAUAAUAG |
| siRNA 818 | 818 | UAUUAUGACAUUCUAUCUU | 3265 | AAGAUAGAAUGUCAUAAUA |
| siRNA 819 | 819 | AUUAUGACAUUCUAUCUUC | 3266 | GAAGAUAGAAUGUCAUAAU |
| siRNA 820 | 820 | UUAUGACAUUCUAUCUUCU | 3267 | AGAAGAUAGAAUGUCAUAA |
| siRNA 821 | 821 | UAUGACAUUCUAUCUUCUU | 3268 | AAGAAGAUAGAAUGUCAUA |
| siRNA 822 | 822 | AUGACAUUCUAUCUUCUUG | 3269 | CAAGAAGAUAGAAUGUCAU |
| siRNA 823 | 823 | UGACAUUCUAUCUUCUUGG | 3270 | CCAAGAAGAUAGAAUGUCA |
| siRNA 824 | 824 | GACAUUCUAUCUUCUUGGU | 3271 | ACCAAGAAGAUAGAAUGUC |
| siRNA 825 | 825 | ACAUUCUAUCUUCUUGGUU | 3272 | AACCAAGAAGAUAGAAUGU |
| siRNA 826 | 826 | CAUUCUAUCUUCUUGGUUG | 3273 | CAACCAAGAAGAUAGAAUG |
| siRNA 827 | 827 | AUUCUAUCUUCUUGGUUGA | 3274 | UCAACCAAGAAGAUAGAAU |
| siRNA 828 | 828 | UUCUAUCUUCUUGGUUGAG | 3275 | CUCAACCAAGAAGAUAGAA |
| siRNA 829 | 829 | UCUAUCUUCUUGGUUGAGG | 3276 | CCUCAACCAAGAAGAUAGA |
| siRNA 830 | 830 | CUAUCUUCUUGGUUGAGGA | 3277 | UCCUCAACCAAGAAGAUAG |
| siRNA 831 | 831 | UAUCUUCUUGGUUGAGGAU | 3278 | AUCCUCAACCAAGAAGAUA |
| siRNA 832 | 832 | AUCUUCUUGGUUGAGGAUU | 3279 | AAUCCUCAACCAAGAAGAU |
| siRNA 833 | 833 | UCUUCUUGGUUGAGGAUUG | 3280 | CAAUCCUCAACCAAGAAGA |
| siRNA 834 | 834 | CUUCUUGGUUGAGGAUUGA | 3281 | UCAAUCCUCAACCAAGAAG |
| siRNA 835 | 835 | UUCUUGGUUGAGGAUUGAA | 3282 | UUCAAUCCUCAACCAAGAA |
| siRNA 836 | 836 | UCUUGGUUGAGGAUUGAAA | 3283 | UUUCAAUCCUCAACCAAGA |
| siRNA 837 | 837 | CUUGGUUGAGGAUUGAAAG | 3284 | CUUUCAAUCCUCAACCAAG |
| siRNA 838 | 838 | UUGGUUGAGGAUUGAAAGU | 3285 | ACUUUCAAUCCUCAACCAA |
| siRNA 839 | 839 | UGGUUGAGGAUUGAAAGUA | 3286 | UACUUUCAAUCCUCAACCA |
| siRNA 840 | 840 | GGUUGAGGAUUGAAAGUAU | 3287 | AUACUUUCAAUCCUCAACC |
| siRNA 841 | 841 | GUUGAGGAUUGAAAGUAUU | 3288 | AAUACUUUCAAUCCUCAAC |
| siRNA 842 | 842 | UUGAGGAUUGAAAGUAUUU | 3289 | AAAUACUUUCAAUCCUCAA |
| siRNA 843 | 843 | UGAGGAUUGAAAGUAUUUA | 3290 | UAAAUACUUUCAAUCCUCA |
| siRNA 844 | 844 | GAGGAUUGAAAGUAUUUAU | 3291 | AUAAAUACUUUCAAUCCUC |
| siRNA 845 | 845 | AGGAUUGAAAGUAUUUAUC | 3292 | GAUAAAUACUUUCAAUCCU |
| siRNA 846 | 846 | GGAUUGAAAGUAUUUAUCG | 3293 | CGAUAAAUACUUUCAAUCC |
| siRNA 847 | 847 | GAUUGAAAGUAUUUAUCGA | 3294 | UCGAUAAAUACUUUCAAUC |
| siRNA 848 | 848 | AUUGAAAGUAUUUAUCGAG | 3295 | CUCGAUAAAUACUUUCAAU |
| siRNA 849 | 849 | UUGAAAGUAUUUAUCGAGU | 3296 | ACUCGAUAAAUACUUUCAA |
| siRNA 850 | 850 | UGAAAGUAUUUAUCGAGUG | 3297 | CACUCGAUAAAUACUUUCA |
| siRNA 851 | 851 | GAAAGUAUUUAUCGAGUGC | 3298 | GCACUCGAUAAAUACUUUC |
| siRNA 852 | 852 | AAAGUAUUUAUCGAGUGCU | 3299 | AGCACUCGAUAAAUACUUU |
| siRNA 853 | 853 | AAGUAUUUAUCGAGUGCUC | 3300 | GAGCACUCGAUAAAUACUU |
| siRNA 854 | 854 | AGUAUUUAUCGAGUGCUCA | 3301 | UGAGCACUCGAUAAAUACU |
| siRNA 855 | 855 | GUAUUUAUCGAGUGCUCAA | 3302 | UUGAGCACUCGAUAAAUAC |
| siRNA 856 | 856 | UAUUUAUCGAGUGCUCAAU | 3303 | AUUGAGCACUCGAUAAAUA |
| siRNA 857 | 857 | AUUUAUCGAGUGCUCAAUG | 3304 | CAUUGAGCACUCGAUAAAU |
| siRNA 858 | 858 | UUUAUCGAGUGCUCAAUGG | 3305 | CCAUUGAGCACUCGAUAAA |
| siRNA 859 | 859 | UUAUCGAGUGCUCAAUGGU | 3306 | ACCAUUGAGCACUCGAUAA |
| siRNA 860 | 860 | UAUCGAGUGCUCAAUGGUG | 3307 | CACCAUUGAGCACUCGAUA |
| siRNA 861 | 861 | AUCGAGUGCUCAAUGGUGC | 3308 | GCACCAUUGAGCACUCGAU |
| siRNA 862 | 862 | UCGAGUGCUCAAUGGUGCC | 3309 | GGCACCAUUGAGCACUCGA |
| siRNA 863 | 863 | CGAGUGCUCAAUGGUGCCC | 3310 | GGGCACCAUUGAGCACUCG |
| siRNA 864 | 864 | GAGUGCUCAAUGGUGCCCA | 3311 | UGGGCACCAUUGAGCACUC |
| siRNA 865 | 865 | AGUGCUCAAUGGUGCCCAG | 3312 | CUGGGCACCAUUGAGCACU |
| siRNA 866 | 866 | GUGCUCAAUGGUGCCCAGG | 3313 | CCUGGGCACCAUUGAGCAC |
| siRNA 867 | 867 | UGCUCAAUGGUGCCCAGGC | 3314 | GCCUGGGCACCAUUGAGCA |
| siRNA 868 | 868 | GCUCAAUGGUGCCCAGGCU | 3315 | AGCCUGGGCACCAUUGAGC |
| siRNA 869 | 869 | CUCAAUGGUGCCCAGGCUG | 3316 | CAGCCUGGGCACCAUUGAG |
| siRNA 870 | 870 | UCAAUGGUGCCCAGGCUGG | 3317 | CCAGCCUGGGCACCAUUGA |
| siRNA 871 | 871 | CAAUGGUGCCCAGGCUGGA | 3318 | UCCAGCCUGGGCACCAUUG |
| siRNA 872 | 872 | AAUGGUGCCCAGGCUGGAG | 3319 | CUCCAGCCUGGGCACCAUU |
| siRNA 873 | 873 | AUGGUGCCCAGGCUGGAGU | 3320 | ACUCCAGCCUGGGCACCAU |
| siRNA 874 | 874 | UGGUGCCCAGGCUGGAGUG | 3321 | CACUCCAGCCUGGGCACCA |
| siRNA 875 | 875 | GGUGCCCAGGCUGGAGUGC | 3322 | GCACUCCAGCCUGGGCACC |
| siRNA 876 | 876 | GUGCCCAGGCUGGAGUGCA | 3323 | UGCACUCCAGCCUGGGCAC |
| siRNA 877 | 877 | UGCCCAGGCUGGAGUGCAG | 3324 | CUGCACUCCAGCCUGGGCA |
| siRNA 878 | 878 | GCCCAGGCUGGAGUGCAGU | 3325 | ACUGCACUCCAGCCUGGGC |
| siRNA 879 | 879 | CCCAGGCUGGAGUGCAGUG | 3326 | CACUGCACUCCAGCCUGGG |
| siRNA 880 | 880 | CCAGGCUGGAGUGCAGUGG | 3327 | CCACUGCACUCCAGCCUGG |
| siRNA 881 | 881 | CAGGCUGGAGUGCAGUGGC | 3328 | GCCACUGCACUCCAGCCUG |
| siRNA 882 | 882 | AGGCUGGAGUGCAGUGGCG | 3329 | CGCCACUGCACUCCAGCCU |
| siRNA 883 | 883 | GGCUGGAGUGCAGUGGCGU | 3330 | ACGCCACUGCACUCCAGCC |
| siRNA 884 | 884 | GCUGGAGUGCAGUGGCGUG | 3331 | CACGCCACUGCACUCCAGC |
| siRNA 885 | 885 | CUGGAGUGCAGUGGCGUGA | 3332 | UCACGCCACUGCACUCCAG |
| siRNA 886 | 886 | UGGAGUGCAGUGGCGUGAU | 3333 | AUCACGCCACUGCACUCCA |
| siRNA 887 | 887 | GGAGUGCAGUGGCGUGAUC | 3334 | GAUCACGCCACUGCACUCC |
| siRNA 888 | 888 | GAGUGCAGUGGCGUGAUCU | 3335 | AGAUCACGCCACUGCACUC |
| siRNA 889 | 889 | AGUGCAGUGGCGUGAUCUC | 3336 | GAGAUCACGCCACUGCACU |
| siRNA 890 | 890 | GUGCAGUGGCGUGAUCUCG | 3337 | CGAGAUCACGCCACUGCAC |
| siRNA 891 | 891 | UGCAGUGGCGUGAUCUCGG | 3338 | CCGAGAUCACGCCACUGCA |
| siRNA 892 | 892 | GCAGUGGCGUGAUCUCGGC | 3339 | GCCGAGAUCACGCCACUGC |
| siRNA 893 | 893 | CAGUGGCGUGAUCUCGGCU | 3340 | AGCCGAGAUCACGCCACUG |
| siRNA 894 | 894 | AGUGGCGUGAUCUCGGCUC | 3341 | GAGCCGAGAUCACGCCACU |
| siRNA 895 | 895 | GUGGCGUGAUCUCGGCUCC | 3342 | GGAGCCGAGAUCACGCCAC |
| siRNA 896 | 896 | UGGCGUGAUCUCGGCUCCC | 3343 | GGGAGCCGAGAUCACGCCA |
| siRNA 897 | 897 | GGCGUGAUCUCGGCUCCCU | 3344 | AGGGAGCCGAGAUCACGCC |
| siRNA 898 | 898 | GCGUGAUCUCGGCUCCCUA | 3345 | UAGGGAGCCGAGAUCACGC |
| siRNA 899 | 899 | CGUGAUCUCGGCUCCCUAC | 3346 | GUAGGGAGCCGAGAUCACG |
| siRNA 900 | 900 | GUGAUCUCGGCUCCCUACA | 3347 | UGUAGGGAGCCGAGAUCAC |
| siRNA 901 | 901 | UGAUCUCGGCUCCCUACAA | 3348 | UUGUAGGGAGCCGAGAUCA |
| siRNA 902 | 902 | GAUCUCGGCUCCCUACAAC | 3349 | GUUGUAGGGAGCCGAGAUC |
| siRNA 903 | 903 | AUCUCGGCUCCCUACAACC | 3350 | GGUUGUAGGGAGCCGAGAU |
| siRNA 904 | 904 | UCUCGGCUCCCUACAACCU | 3351 | AGGUUGUAGGGAGCCGAGA |
| siRNA 905 | 905 | CUCGGCUCCCUACAACCUC | 3352 | GAGGUUGUAGGGAGCCGAG |
| siRNA 906 | 906 | UCGGCUCCCUACAACCUCC | 3353 | GGAGGUUGUAGGGAGCCGA |
| siRNA 907 | 907 | CGGCUCCCUACAACCUCCA | 3354 | UGGAGGUUGUAGGGAGCCG |
| siRNA 908 | 908 | GGCUCCCUACAACCUCCAC | 3355 | GUGGAGGUUGUAGGGAGCC |
| siRNA 909 | 909 | GCUCCCUACAACCUCCACC | 3356 | GGUGGAGGUUGUAGGGAGC |
| siRNA 910 | 910 | CUCCCUACAACCUCCACCU | 3357 | AGGUGGAGGUUGUAGGGAG |
| siRNA 911 | 911 | UCCCUACAACCUCCACCUC | 3358 | GAGGUGGAGGUUGUAGGGA |
| siRNA 912 | 912 | CCCUACAACCUCCACCUCC | 3359 | GGAGGUGGAGGUUGUAGGG |
| siRNA 913 | 913 | CCUACAACCUCCACCUCCC | 3360 | GGGAGGUGGAGGUUGUAGG |
| siRNA 914 | 914 | CUACAACCUCCACCUCCCA | 3361 | UGGGAGGUGGAGGUUGUAG |
| siRNA 915 | 915 | UACAACCUCCACCUCCCAG | 3362 | CUGGGAGGUGGAGGUUGUA |
| siRNA 916 | 916 | ACAACCUCCACCUCCCAGC | 3363 | GCUGGGAGGUGGAGGUUGU |
| siRNA 917 | 917 | CAACCUCCACCUCCCAGCC | 3364 | GGCUGGGAGGUGGAGGUUG |
| siRNA 918 | 918 | AACCUCCACCUCCCAGCCG | 3365 | CGGCUGGGAGGUGGAGGUU |
| siRNA 919 | 919 | ACCUCCACCUCCCAGCCGC | 3366 | GCGGCUGGGAGGUGGAGGU |
| siRNA 920 | 920 | CCUCCACCUCCCAGCCGCC | 3367 | GGCGGCUGGGAGGUGGAGG |
| siRNA 921 | 921 | CUCCACCUCCCAGCCGCCU | 3368 | AGGCGGCUGGGAGGUGGAG |
| siRNA 922 | 922 | UCCACCUCCCAGCCGCCUG | 3369 | CAGGCGGCUGGGAGGUGGA |
| siRNA 923 | 923 | CCACCUCCCAGCCGCCUGC | 3370 | GCAGGCGGCUGGGAGGUGG |
| siRNA 924 | 924 | CACCUCCCAGCCGCCUGCC | 3371 | GGCAGGCGGCUGGGAGGUG |
| siRNA 925 | 925 | ACCUCCCAGCCGCCUGCCU | 3372 | AGGCAGGCGGCUGGGAGGU |
| siRNA 926 | 926 | CCUCCCAGCCGCCUGCCUU | 3373 | AAGGCAGGCGGCUGGGAGG |
| siRNA 927 | 927 | CUCCCAGCCGCCUGCCUUG | 3374 | CAAGGCAGGCGGCUGGGAG |
| siRNA 928 | 928 | UCCCAGCCGCCUGCCUUGG | 3375 | CCAAGGCAGGCGGCUGGGA |
| siRNA 929 | 929 | CCCAGCCGCCUGCCUUGGC | 3376 | GCCAAGGCAGGCGGCUGGG |
| siRNA 930 | 930 | CCAGCCGCCUGCCUUGGCC | 3377 | GGCCAAGGCAGGCGGCUGG |
| siRNA 931 | 931 | CAGCCGCCUGCCUUGGCCU | 3378 | AGGCCAAGGCAGGCGGCUG |
| siRNA 932 | 932 | AGCCGCCUGCCUUGGCCUC | 3379 | GAGGCCAAGGCAGGCGGCU |
| siRNA 933 | 933 | GCCGCCUGCCUUGGCCUCC | 3380 | GGAGGCCAAGGCAGGCGGC |
| siRNA 934 | 934 | CCGCCUGCCUUGGCCUCCC | 3381 | GGGAGGCCAAGGCAGGCGG |
| siRNA 935 | 935 | CGCCUGCCUUGGCCUCCCA | 3382 | UGGGAGGCCAAGGCAGGCG |
| siRNA 936 | 936 | GCCUGCCUUGGCCUCCCAA | 3383 | UUGGGAGGCCAAGGCAGGC |
| siRNA 937 | 937 | CCUGCCUUGGCCUCCCAAA | 3384 | UUUGGGAGGCCAAGGCAGG |
| siRNA 938 | 938 | CUGCCUUGGCCUCCCAAAG | 3385 | CUUUGGGAGGCCAAGGCAG |
| siRNA 939 | 939 | UGCCUUGGCCUCCCAAAGU | 3386 | ACUUUGGGAGGCCAAGGCA |
| siRNA 940 | 940 | GCCUUGGCCUCCCAAAGUG | 3387 | CACUUUGGGAGGCCAAGGC |
| siRNA 941 | 941 | CCUUGGCCUCCCAAAGUGC | 3388 | GCACUUUGGGAGGCCAAGG |
| siRNA 942 | 942 | CUUGGCCUCCCAAAGUGCC | 3389 | GGCACUUUGGGAGGCCAAG |
| siRNA 943 | 943 | UUGGCCUCCCAAAGUGCCG | 3390 | CGGCACUUUGGGAGGCCAA |
| siRNA 944 | 944 | UGGCCUCCCAAAGUGCCGA | 3391 | UCGGCACUUUGGGAGGCCA |
| siRNA 945 | 945 | GGCCUCCCAAAGUGCCGAG | 3392 | CUCGGCACUUUGGGAGGCC |
| siRNA 946 | 946 | GCCUCCCAAAGUGCCGAGA | 3393 | UCUCGGCACUUUGGGAGGC |
| siRNA 947 | 947 | CCUCCCAAAGUGCCGAGAG | 3394 | CUCUCGGCACUUUGGGAGG |
| siRNA 948 | 948 | CUCCCAAAGUGCCGAGAGU | 3395 | ACUCUCGGCACUUUGGGAG |
| siRNA 949 | 949 | UCCCAAAGUGCCGAGAGUG | 3396 | CACUCUCGGCACUUUGGGA |
| siRNA 950 | 950 | CCCAAAGUGCCGAGAGUGC | 3397 | GCACUCUCGGCACUUUGGG |
| siRNA 951 | 951 | CCAAAGUGCCGAGAGUGCA | 3398 | UGCACUCUCGGCACUUUGG |
| siRNA 952 | 952 | CAAAGUGCCGAGAGUGCAG | 3399 | CUGCACUCUCGGCACUUUG |
| siRNA 953 | 953 | AAAGUGCCGAGAGUGCAGC | 3400 | GCUGCACUCUCGGCACUUU |
| siRNA 954 | 954 | AAGUGCCGAGAGUGCAGCC | 3401 | GGCUGCACUCUCGGCACUU |
| siRNA 955 | 955 | AGUGCCGAGAGUGCAGCCU | 3402 | AGGCUGCACUCUCGGCACU |
| siRNA 956 | 956 | GUGCCGAGAGUGCAGCCUC | 3403 | GAGGCUGCACUCUCGGCAC |
| siRNA 957 | 957 | UGCCGAGAGUGCAGCCUCU | 3404 | AGAGGCUGCACUCUCGGCA |
| siRNA 958 | 958 | GCCGAGAGUGCAGCCUCUG | 3405 | CAGAGGCUGCACUCUCGGC |
| siRNA 959 | 959 | CCGAGAGUGCAGCCUCUGC | 3406 | GCAGAGGCUGCACUCUCGG |
| siRNA 960 | 960 | CGAGAGUGCAGCCUCUGCC | 3407 | GGCAGAGGCUGCACUCUCG |
| siRNA 961 | 961 | GAGAGUGCAGCCUCUGCCC | 3408 | GGGCAGAGGCUGCACUCUC |
| siRNA 962 | 962 | AGAGUGCAGCCUCUGCCCG | 3409 | CGGGCAGAGGCUGCACUCU |
| siRNA 963 | 963 | GAGUGCAGCCUCUGCCCGG | 3410 | CCGGGCAGAGGCUGCACUC |
| siRNA 964 | 964 | AGUGCAGCCUCUGCCCGGC | 3411 | GCCGGGCAGAGGCUGCACU |
| siRNA 965 | 965 | GUGCAGCCUCUGCCCGGCC | 3412 | GGCCGGGCAGAGGCUGCAC |
| siRNA 966 | 966 | UGCAGCCUCUGCCCGGCCG | 3413 | CGGCCGGGCAGAGGCUGCA |
| siRNA 967 | 967 | GCAGCCUCUGCCCGGCCGC | 3414 | GCGGCCGGGCAGAGGCUGC |
| siRNA 968 | 968 | CAGCCUCUGCCCGGCCGCC | 3415 | GGCGGCCGGGCAGAGGCUG |
| siRNA 969 | 969 | AGCCUCUGCCCGGCCGCCA | 3416 | UGGCGGCCGGGCAGAGGCU |
| siRNA 970 | 970 | GCCUCUGCCCGGCCGCCAC | 3417 | GUGGCGGCCGGGCAGAGGC |
| siRNA 971 | 971 | CCUCUGCCCGGCCGCCACC | 3418 | GGUGGCGGCCGGGCAGAGG |
| siRNA 972 | 972 | CUCUGCCCGGCCGCCACCC | 3419 | GGGUGGCGGCCGGGCAGAG |
| siRNA 973 | 973 | UCUGCCCGGCCGCCACCCC | 3420 | GGGGUGGCGGCCGGGCAGA |
| siRNA 974 | 974 | CUGCCCGGCCGCCACCCCG | 3421 | CGGGGUGGCGGCCGGGCAG |
| siRNA 975 | 975 | UGCCCGGCCGCCACCCCGU | 3422 | ACGGGGUGGCGGCCGGGCA |
| siRNA 976 | 976 | GCCCGGCCGCCACCCCGUC | 3423 | GACGGGGUGGCGGCCGGGC |
| siRNA 977 | 977 | CCCGGCCGCCACCCCGUCU | 3424 | AGACGGGGUGGCGGCCGGG |
| siRNA 978 | 978 | CCGGCCGCCACCCCGUCUG | 3425 | CAGACGGGGUGGCGGCCGG |
| siRNA 979 | 979 | CGGCCGCCACCCCGUCUGG | 3426 | CCAGACGGGGUGGCGGCCG |
| siRNA 980 | 980 | GGCCGCCACCCCGUCUGGG | 3427 | CCCAGACGGGGUGGCGGCC |
| siRNA 981 | 981 | GCCGCCACCCCGUCUGGGA | 3428 | UCCCAGACGGGGUGGCGGC |
| siRNA 982 | 982 | CCGCCACCCCGUCUGGGAA | 3429 | UUCCCAGACGGGGUGGCGG |
| siRNA 983 | 983 | CGCCACCCCGUCUGGGAAG | 3430 | CUUCCCAGACGGGGUGGCG |
| siRNA 984 | 984 | GCCACCCCGUCUGGGAAGU | 3431 | ACUUCCCAGACGGGGUGGC |
| siRNA 985 | 985 | CCACCCCGUCUGGGAAGUG | 3432 | CACUUCCCAGACGGGGUGG |
| siRNA 986 | 986 | CACCCCGUCUGGGAAGUGA | 3433 | UCACUUCCCAGACGGGGUG |
| siRNA 987 | 987 | ACCCCGUCUGGGAAGUGAG | 3434 | CUCACUUCCCAGACGGGGU |
| siRNA 988 | 988 | CCCCGUCUGGGAAGUGAGG | 3435 | CCUCACUUCCCAGACGGGG |
| siRNA 989 | 989 | CCCGUCUGGGAAGUGAGGA | 3436 | UCCUCACUUCCCAGACGGG |
| siRNA 990 | 990 | CCGUCUGGGAAGUGAGGAG | 3437 | CUCCUCACUUCCCAGACGG |
| siRNA 991 | 991 | CGUCUGGGAAGUGAGGAGC | 3438 | GCUCCUCACUUCCCAGACG |
| siRNA 992 | 992 | GUCUGGGAAGUGAGGAGCG | 3439 | CGCUCCUCACUUCCCAGAC |
| siRNA 993 | 993 | UCUGGGAAGUGAGGAGCGU | 3440 | ACGCUCCUCACUUCCCAGA |
| siRNA 994 | 994 | CUGGGAAGUGAGGAGCGUC | 3441 | GACGCUCCUCACUUCCCAG |
| siRNA 995 | 995 | UGGGAAGUGAGGAGCGUCU | 3442 | AGACGCUCCUCACUUCCCA |
| siRNA 996 | 996 | GGGAAGUGAGGAGCGUCUC | 3443 | GAGACGCUCCUCACUUCCC |
| siRNA 997 | 997 | GGAAGUGAGGAGCGUCUCU | 3444 | AGAGACGCUCCUCACUUCC |
| siRNA 998 | 998 | GAAGUGAGGAGCGUCUCUG | 3445 | CAGAGACGCUCCUCACUUC |
| siRNA 999 | 999 | AAGUGAGGAGCGUCUCUGC | 3446 | GCAGAGACGCUCCUCACUU |
| siRNA 1000 | 1000 | AGUGAGGAGCGUCUCUGCC | 3447 | GGCAGAGACGCUCCUCACU |
| siRNA 1001 | 1001 | GUGAGGAGCGUCUCUGCCU | 3448 | AGGCAGAGACGCUCCUCAC |
| siRNA 1002 | 1002 | UGAGGAGCGUCUCUGCCUG | 3449 | CAGGCAGAGACGCUCCUCA |
| siRNA 1003 | 1003 | GAGGAGCGUCUCUGCCUGG | 3450 | CCAGGCAGAGACGCUCCUC |
| siRNA 1004 | 1004 | AGGAGCGUCUCUGCCUGGC | 3451 | GCCAGGCAGAGACGCUCCU |
| siRNA 1005 | 1005 | GGAGCGUCUCUGCCUGGCC | 3452 | GGCCAGGCAGAGACGCUCC |
| siRNA 1006 | 1006 | GAGCGUCUCUGCCUGGCCG | 3453 | CGGCCAGGCAGAGACGCUC |
| siRNA 1007 | 1007 | AGCGUCUCUGCCUGGCCGC | 3454 | GCGGCCAGGCAGAGACGCU |
| siRNA 1008 | 1008 | GCGUCUCUGCCUGGCCGCC | 3455 | GGCGGCCAGGCAGAGACGC |
| siRNA 1009 | 1009 | CGUCUCUGCCUGGCCGCCU | 3456 | AGGCGGCCAGGCAGAGACG |
| siRNA 1010 | 1010 | GUCUCUGCCUGGCCGCCUA | 3457 | UAGGCGGCCAGGCAGAGAC |
| siRNA 1011 | 1011 | UCUCUGCCUGGCCGCCUAU | 3458 | AUAGGCGGCCAGGCAGAGA |
| siRNA 1012 | 1012 | CUCUGCCUGGCCGCCUAUC | 3459 | GAUAGGCGGCCAGGCAGAG |
| siRNA 1013 | 1013 | UCUGCCUGGCCGCCUAUCG | 3460 | CGAUAGGCGGCCAGGCAGA |
| siRNA 1014 | 1014 | CUGCCUGGCCGCCUAUCGU | 3461 | ACGAUAGGCGGCCAGGCAG |
| siRNA 1015 | 1015 | UGCCUGGCCGCCUAUCGUC | 3462 | GACGAUAGGCGGCCAGGCA |
| siRNA 1016 | 1016 | GCCUGGCCGCCUAUCGUCU | 3463 | AGACGAUAGGCGGCCAGGC |
| siRNA 1017 | 1017 | CCUGGCCGCCUAUCGUCUG | 3464 | CAGACGAUAGGCGGCCAGG |
| siRNA 1018 | 1018 | CUGGCCGCCUAUCGUCUGG | 3465 | CCAGACGAUAGGCGGCCAG |
| siRNA 1019 | 1019 | UGGCCGCCUAUCGUCUGGG | 3466 | CCCAGACGAUAGGCGGCCA |
| siRNA 1020 | 1020 | GGCCGCCUAUCGUCUGGGA | 3467 | UCCCAGACGAUAGGCGGCC |
| siRNA 1021 | 1021 | GCCGCCUAUCGUCUGGGAC | 3468 | GUCCCAGACGAUAGGCGGC |
| siRNA 1022 | 1022 | CCGCCUAUCGUCUGGGACG | 3469 | CGUCCCAGACGAUAGGCGG |
| siRNA 1023 | 1023 | CGCCUAUCGUCUGGGACGU | 3470 | ACGUCCCAGACGAUAGGCG |
| siRNA 1024 | 1024 | GCCUAUCGUCUGGGACGUG | 3471 | CACGUCCCAGACGAUAGGC |
| siRNA 1025 | 1025 | CCUAUCGUCUGGGACGUGA | 3472 | UCACGUCCCAGACGAUAGG |
| siRNA 1026 | 1026 | CUAUCGUCUGGGACGUGAG | 3473 | CUCACGUCCCAGACGAUAG |
| siRNA 1027 | 1027 | UAUCGUCUGGGACGUGAGG | 3474 | CCUCACGUCCCAGACGAUA |
| siRNA 1028 | 1028 | AUCGUCUGGGACGUGAGGA | 3475 | UCCUCACGUCCCAGACGAU |
| siRNA 1029 | 1029 | UCGUCUGGGACGUGAGGAG | 3476 | CUCCUCACGUCCCAGACGA |
| siRNA 1030 | 1030 | CGUCUGGGACGUGAGGAGC | 3477 | GCUCCUCACGUCCCAGACG |
| siRNA 1031 | 1031 | GUCUGGGACGUGAGGAGCC | 3478 | GGCUCCUCACGUCCCAGAC |
| siRNA 1032 | 1032 | UCUGGGACGUGAGGAGCCC | 3479 | GGGCUCCUCACGUCCCAGA |
| siRNA 1033 | 1033 | CUGGGACGUGAGGAGCCCC | 3480 | GGGGCUCCUCACGUCCCAG |
| siRNA 1034 | 1034 | UGGGACGUGAGGAGCCCCU | 3481 | AGGGGCUCCUCACGUCCCA |
| siRNA 1035 | 1035 | GGGACGUGAGGAGCCCCUC | 3482 | GAGGGGCUCCUCACGUCCC |
| siRNA 1036 | 1036 | GGACGUGAGGAGCCCCUCU | 3483 | AGAGGGGCUCCUCACGUCC |
| siRNA 1037 | 1037 | GACGUGAGGAGCCCCUCUG | 3484 | CAGAGGGGCUCCUCACGUC |
| siRNA 1038 | 1038 | ACGUGAGGAGCCCCUCUGC | 3485 | GCAGAGGGGCUCCUCACGU |
| siRNA 1039 | 1039 | CGUGAGGAGCCCCUCUGCC | 3486 | GGCAGAGGGGCUCCUCACG |
| siRNA 1040 | 1040 | GUGAGGAGCCCCUCUGCCU | 3487 | AGGCAGAGGGGCUCCUCAC |
| siRNA 1041 | 1041 | UGAGGAGCCCCUCUGCCUG | 3488 | CAGGCAGAGGGGCUCCUCA |
| siRNA 1042 | 1042 | GAGGAGCCCCUCUGCCUGG | 3489 | CCAGGCAGAGGGGCUCCUC |
| siRNA 1043 | 1043 | AGGAGCCCCUCUGCCUGGC | 3490 | GCCAGGCAGAGGGGCUCCU |
| siRNA 1044 | 1044 | GGAGCCCCUCUGCCUGGCU | 3491 | AGCCAGGCAGAGGGGCUCC |
| siRNA 1045 | 1045 | GAGCCCCUCUGCCUGGCUG | 3492 | CAGCCAGGCAGAGGGGCUC |
| siRNA 1046 | 1046 | AGCCCCUCUGCCUGGCUGC | 3493 | GCAGCCAGGCAGAGGGGCU |
| siRNA 1047 | 1047 | GCCCCUCUGCCUGGCUGCC | 3494 | GGCAGCCAGGCAGAGGGGC |
| siRNA 1048 | 1048 | CCCCUCUGCCUGGCUGCCC | 3495 | GGGCAGCCAGGCAGAGGGG |
| siRNA 1049 | 1049 | CCCUCUGCCUGGCUGCCCA | 3496 | UGGGCAGCCAGGCAGAGGG |
| siRNA 1050 | 1050 | CCUCUGCCUGGCUGCCCAG | 3497 | CUGGGCAGCCAGGCAGAGG |
| siRNA 1051 | 1051 | CUCUGCCUGGCUGCCCAGU | 3498 | ACUGGGCAGCCAGGCAGAG |
| siRNA 1052 | 1052 | UCUGCCUGGCUGCCCAGUC | 3499 | GACUGGGCAGCCAGGCAGA |
| siRNA 1053 | 1053 | CUGCCUGGCUGCCCAGUCU | 3500 | AGACUGGGCAGCCAGGCAG |
| siRNA 1054 | 1054 | UGCCUGGCUGCCCAGUCUG | 3501 | CAGACUGGGCAGCCAGGCA |
| siRNA 1055 | 1055 | GCCUGGCUGCCCAGUCUGG | 3502 | CCAGACUGGGCAGCCAGGC |
| siRNA 1056 | 1056 | CCUGGCUGCCCAGUCUGGA | 3503 | UCCAGACUGGGCAGCCAGG |
| siRNA 1057 | 1057 | CUGGCUGCCCAGUCUGGAA | 3504 | UUCCAGACUGGGCAGCCAG |
| siRNA 1058 | 1058 | UGGCUGCCCAGUCUGGAAA | 3505 | UUUCCAGACUGGGCAGCCA |
| siRNA 1059 | 1059 | GGCUGCCCAGUCUGGAAAG | 3506 | CUUUCCAGACUGGGCAGCC |
| siRNA 1060 | 1060 | GCUGCCCAGUCUGGAAAGU | 3507 | ACUUUCCAGACUGGGCAGC |
| siRNA 1061 | 1061 | CUGCCCAGUCUGGAAAGUG | 3508 | CACUUUCCAGACUGGGCAG |
| siRNA 1062 | 1062 | UGCCCAGUCUGGAAAGUGA | 3509 | UCACUUUCCAGACUGGGCA |
| siRNA 1063 | 1063 | GCCCAGUCUGGAAAGUGAG | 3510 | CUCACUUUCCAGACUGGGC |
| siRNA 1064 | 1064 | CCCAGUCUGGAAAGUGAGG | 3511 | CCUCACUUUCCAGACUGGG |
| siRNA 1065 | 1065 | CCAGUCUGGAAAGUGAGGA | 3512 | UCCUCACUUUCCAGACUGG |
| siRNA 1066 | 1066 | CAGUCUGGAAAGUGAGGAG | 3513 | CUCCUCACUUUCCAGACUG |
| siRNA 1067 | 1067 | AGUCUGGAAAGUGAGGAGC | 3514 | GCUCCUCACUUUCCAGACU |
| siRNA 1068 | 1068 | GUCUGGAAAGUGAGGAGCG | 3515 | CGCUCCUCACUUUCCAGAC |
| siRNA 1069 | 1069 | UCUGGAAAGUGAGGAGCGU | 3516 | ACGCUCCUCACUUUCCAGA |
| siRNA 1070 | 1070 | CUGGAAAGUGAGGAGCGUC | 3517 | GACGCUCCUCACUUUCCAG |
| siRNA 1071 | 1071 | UGGAAAGUGAGGAGCGUCU | 3518 | AGACGCUCCUCACUUUCCA |
| siRNA 1072 | 1072 | GGAAAGUGAGGAGCGUCUC | 3519 | GAGACGCUCCUCACUUUCC |
| siRNA 1073 | 1073 | GAAAGUGAGGAGCGUCUCU | 3520 | AGAGACGCUCCUCACUUUC |
| siRNA 1074 | 1074 | AAAGUGAGGAGCGUCUCUG | 3521 | CAGAGACGCUCCUCACUUU |
| siRNA 1075 | 1075 | AAGUGAGGAGCGUCUCUGC | 3522 | GCAGAGACGCUCCUCACUU |
| siRNA 1076 | 1076 | AGUGAGGAGCGUCUCUGCC | 3523 | GGCAGAGACGCUCCUCACU |
| siRNA 1077 | 1077 | GUGAGGAGCGUCUCUGCCC | 3524 | GGGCAGAGACGCUCCUCAC |
| siRNA 1078 | 1078 | UGAGGAGCGUCUCUGCCCG | 3525 | CGGGCAGAGACGCUCCUCA |
| siRNA 1079 | 1079 | GAGGAGCGUCUCUGCCCGG | 3526 | CCGGGCAGAGACGCUCCUC |
| siRNA 1080 | 1080 | AGGAGCGUCUCUGCCCGGC | 3527 | GCCGGGCAGAGACGCUCCU |
| siRNA 1081 | 1081 | GGAGCGUCUCUGCCCGGCU | 3528 | AGCCGGGCAGAGACGCUCC |
| siRNA 1082 | 1082 | GAGCGUCUCUGCCCGGCUG | 3529 | CAGCCGGGCAGAGACGCUC |
| siRNA 1083 | 1083 | AGCGUCUCUGCCCGGCUGC | 3530 | GCAGCCGGGCAGAGACGCU |
| siRNA 1084 | 1084 | GCGUCUCUGCCCGGCUGCC | 3531 | GGCAGCCGGGCAGAGACGC |
| siRNA 1085 | 1085 | CGUCUCUGCCCGGCUGCCA | 3532 | UGGCAGCCGGGCAGAGACG |
| siRNA 1086 | 1086 | GUCUCUGCCCGGCUGCCAU | 3533 | AUGGCAGCCGGGCAGAGAC |
| siRNA 1087 | 1087 | UCUCUGCCCGGCUGCCAUC | 3534 | GAUGGCAGCCGGGCAGAGA |
| siRNA 1088 | 1088 | CUCUGCCCGGCUGCCAUCC | 3535 | GGAUGGCAGCCGGGCAGAG |
| siRNA 1089 | 1089 | UCUGCCCGGCUGCCAUCCC | 3536 | GGGAUGGCAGCCGGGCAGA |
| siRNA 1090 | 1090 | CUGCCCGGCUGCCAUCCCA | 3537 | UGGGAUGGCAGCCGGGCAG |
| siRNA 1091 | 1091 | UGCCCGGCUGCCAUCCCAU | 3538 | AUGGGAUGGCAGCCGGGCA |
| siRNA 1092 | 1092 | GCCCGGCUGCCAUCCCAUC | 3539 | GAUGGGAUGGCAGCCGGGC |
| siRNA 1093 | 1093 | CCCGGCUGCCAUCCCAUCU | 3540 | AGAUGGGAUGGCAGCCGGG |
| siRNA 1094 | 1094 | CCGGCUGCCAUCCCAUCUA | 3541 | UAGAUGGGAUGGCAGCCGG |
| siRNA 1095 | 1095 | CGGCUGCCAUCCCAUCUAG | 3542 | CUAGAUGGGAUGGCAGCCG |
| siRNA 1096 | 1096 | GGCUGCCAUCCCAUCUAGG | 3543 | CCUAGAUGGGAUGGCAGCC |
| siRNA 1097 | 1097 | GCUGCCAUCCCAUCUAGGA | 3544 | UCCUAGAUGGGAUGGCAGC |
| siRNA 1098 | 1098 | CUGCCAUCCCAUCUAGGAA | 3545 | UUCCUAGAUGGGAUGGCAG |
| siRNA 1099 | 1099 | UGCCAUCCCAUCUAGGAAG | 3546 | CUUCCUAGAUGGGAUGGCA |
| siRNA 1100 | 1100 | GCCAUCCCAUCUAGGAAGU | 3547 | ACUUCCUAGAUGGGAUGGC |
| siRNA 1101 | 1101 | CCAUCCCAUCUAGGAAGUG | 3548 | CACUUCCUAGAUGGGAUGG |
| siRNA 1102 | 1102 | CAUCCCAUCUAGGAAGUGG | 3549 | CCACUUCCUAGAUGGGAUG |
| siRNA 1103 | 1103 | AUCCCAUCUAGGAAGUGGG | 3550 | CCCACUUCCUAGAUGGGAU |
| siRNA 1104 | 1104 | UCCCAUCUAGGAAGUGGGG | 3551 | CCCCACUUCCUAGAUGGGA |
| siRNA 1105 | 1105 | CCCAUCUAGGAAGUGGGGA | 3552 | UCCCCACUUCCUAGAUGGG |
| siRNA 1106 | 1106 | CCAUCUAGGAAGUGGGGAG | 3553 | CUCCCCACUUCCUAGAUGG |
| siRNA 1107 | 1107 | CAUCUAGGAAGUGGGGAGC | 3554 | GCUCCCCACUUCCUAGAUG |
| siRNA 1108 | 1108 | AUCUAGGAAGUGGGGAGCG | 3555 | CGCUCCCCACUUCCUAGAU |
| siRNA 1109 | 1109 | UCUAGGAAGUGGGGAGCGC | 3556 | GCGCUCCCCACUUCCUAGA |
| siRNA 1110 | 1110 | CUAGGAAGUGGGGAGCGCC | 3557 | GGCGCUCCCCACUUCCUAG |
| siRNA 1111 | 1111 | UAGGAAGUGGGGAGCGCCU | 3558 | AGGCGCUCCCCACUUCCUA |
| siRNA 1112 | 1112 | AGGAAGUGGGGAGCGCCUC | 3559 | GAGGCGCUCCCCACUUCCU |
| siRNA 1113 | 1113 | GGAAGUGGGGAGCGCCUCU | 3560 | AGAGGCGCUCCCCACUUCC |
| siRNA 1114 | 1114 | GAAGUGGGGAGCGCCUCUU | 3561 | AAGAGGCGCUCCCCACUUC |
| siRNA 1115 | 1115 | AAGUGGGGAGCGCCUCUUC | 3562 | GAAGAGGCGCUCCCCACUU |
| siRNA 1116 | 1116 | AGUGGGGAGCGCCUCUUCC | 3563 | GGAAGAGGCGCUCCCCACU |
| siRNA 1117 | 1117 | GUGGGGAGCGCCUCUUCCC | 3564 | GGGAAGAGGCGCUCCCCAC |
| siRNA 1118 | 1118 | UGGGGAGCGCCUCUUCCCG | 3565 | CGGGAAGAGGCGCUCCCCA |
| siRNA 1119 | 1119 | GGGGAGCGCCUCUUCCCGG | 3566 | CCGGGAAGAGGCGCUCCCC |
| siRNA 1120 | 1120 | GGGAGCGCCUCUUCCCGGC | 3567 | GCCGGGAAGAGGCGCUCCC |
| siRNA 1121 | 1121 | GGAGCGCCUCUUCCCGGCC | 3568 | GGCCGGGAAGAGGCGCUCC |
| siRNA 1122 | 1122 | GAGCGCCUCUUCCCGGCCA | 3569 | UGGCCGGGAAGAGGCGCUC |
| siRNA 1123 | 1123 | AGCGCCUCUUCCCGGCCAC | 3570 | GUGGCCGGGAAGAGGCGCU |
| siRNA 1124 | 1124 | GCGCCUCUUCCCGGCCACC | 3571 | GGUGGCCGGGAAGAGGCGC |
| siRNA 1125 | 1125 | CGCCUCUUCCCGGCCACCA | 3572 | UGGUGGCCGGGAAGAGGCG |
| siRNA 1126 | 1126 | GCCUCUUCCCGGCCACCAU | 3573 | AUGGUGGCCGGGAAGAGGC |
| siRNA 1127 | 1127 | CCUCUUCCCGGCCACCAUC | 3574 | GAUGGUGGCCGGGAAGAGG |
| siRNA 1128 | 1128 | CUCUUCCCGGCCACCAUCC | 3575 | GGAUGGUGGCCGGGAAGAG |
| siRNA 1129 | 1129 | UCUUCCCGGCCACCAUCCC | 3576 | GGGAUGGUGGCCGGGAAGA |
| siRNA 1130 | 1130 | CUUCCCGGCCACCAUCCCA | 3577 | UGGGAUGGUGGCCGGGAAG |
| siRNA 1131 | 1131 | UUCCCGGCCACCAUCCCAU | 3578 | AUGGGAUGGUGGCCGGGAA |
| siRNA 1132 | 1132 | UCCCGGCCACCAUCCCAUC | 3579 | GAUGGGAUGGUGGCCGGGA |
| siRNA 1133 | 1133 | CCCGGCCACCAUCCCAUCU | 3580 | AGAUGGGAUGGUGGCCGGG |
| siRNA 1134 | 1134 | CCGGCCACCAUCCCAUCUG | 3581 | CAGAUGGGAUGGUGGCCGG |
| siRNA 1135 | 1135 | CGGCCACCAUCCCAUCUGG | 3582 | CCAGAUGGGAUGGUGGCCG |
| siRNA 1136 | 1136 | GGCCACCAUCCCAUCUGGG | 3583 | CCCAGAUGGGAUGGUGGCC |
| siRNA 1137 | 1137 | GCCACCAUCCCAUCUGGGA | 3584 | UCCCAGAUGGGAUGGUGGC |
| siRNA 1138 | 1138 | CCACCAUCCCAUCUGGGAG | 3585 | CUCCCAGAUGGGAUGGUGG |
| siRNA 1139 | 1139 | CACCAUCCCAUCUGGGAGG | 3586 | CCUCCCAGAUGGGAUGGUG |
| siRNA 1140 | 1140 | ACCAUCCCAUCUGGGAGGU | 3587 | ACCUCCCAGAUGGGAUGGU |
| siRNA 1141 | 1141 | CCAUCCCAUCUGGGAGGUG | 3588 | CACCUCCCAGAUGGGAUGG |
| siRNA 1142 | 1142 | CAUCCCAUCUGGGAGGUGA | 3589 | UCACCUCCCAGAUGGGAUG |
| siRNA 1143 | 1143 | AUCCCAUCUGGGAGGUGAG | 3590 | CUCACCUCCCAGAUGGGAU |
| siRNA 1144 | 1144 | UCCCAUCUGGGAGGUGAGG | 3591 | CCUCACCUCCCAGAUGGGA |
| siRNA 1145 | 1145 | CCCAUCUGGGAGGUGAGGA | 3592 | UCCUCACCUCCCAGAUGGG |
| siRNA 1146 | 1146 | CCAUCUGGGAGGUGAGGAG | 3593 | CUCCUCACCUCCCAGAUGG |
| siRNA 1147 | 1147 | CAUCUGGGAGGUGAGGAGU | 3594 | ACUCCUCACCUCCCAGAUG |
| siRNA 1148 | 1148 | AUCUGGGAGGUGAGGAGUG | 3595 | CACUCCUCACCUCCCAGAU |
| siRNA 1149 | 1149 | UCUGGGAGGUGAGGAGUGU | 3596 | ACACUCCUCACCUCCCAGA |
| siRNA 1150 | 1150 | CUGGGAGGUGAGGAGUGUC | 3597 | GACACUCCUCACCUCCCAG |
| siRNA 1151 | 1151 | UGGGAGGUGAGGAGUGUCU | 3598 | AGACACUCCUCACCUCCCA |
| siRNA 1152 | 1152 | GGGAGGUGAGGAGUGUCUC | 3599 | GAGACACUCCUCACCUCCC |
| siRNA 1153 | 1153 | GGAGGUGAGGAGUGUCUCC | 3600 | GGAGACACUCCUCACCUCC |
| siRNA 1154 | 1154 | GAGGUGAGGAGUGUCUCCG | 3601 | CGGAGACACUCCUCACCUC |
| siRNA 1155 | 1155 | AGGUGAGGAGUGUCUCCGC | 3602 | GCGGAGACACUCCUCACCU |
| siRNA 1156 | 1156 | GGUGAGGAGUGUCUCCGCC | 3603 | GGCGGAGACACUCCUCACC |
| siRNA 1157 | 1157 | GUGAGGAGUGUCUCCGCCC | 3604 | GGGCGGAGACACUCCUCAC |
| siRNA 1158 | 1158 | UGAGGAGUGUCUCCGCCCG | 3605 | CGGGCGGAGACACUCCUCA |
| siRNA 1159 | 1159 | GAGGAGUGUCUCCGCCCGG | 3606 | CCGGGCGGAGACACUCCUC |
| siRNA 1160 | 1160 | AGGAGUGUCUCCGCCCGGC | 3607 | GCCGGGCGGAGACACUCCU |
| siRNA 1161 | 1161 | GGAGUGUCUCCGCCCGGCC | 3608 | GGCCGGGCGGAGACACUCC |
| siRNA 1162 | 1162 | GAGUGUCUCCGCCCGGCCG | 3609 | CGGCCGGGCGGAGACACUC |
| siRNA 1163 | 1163 | AGUGUCUCCGCCCGGCCGC | 3610 | GCGGCCGGGCGGAGACACU |
| siRNA 1164 | 1164 | GUGUCUCCGCCCGGCCGCC | 3611 | GGCGGCCGGGCGGAGACAC |
| siRNA 1165 | 1165 | UGUCUCCGCCCGGCCGCCC | 3612 | GGGCGGCCGGGCGGAGACA |
| siRNA 1166 | 1166 | GUCUCCGCCCGGCCGCCCA | 3613 | UGGGCGGCCGGGCGGAGAC |
| siRNA 1167 | 1167 | UCUCCGCCCGGCCGCCCAU | 3614 | AUGGGCGGCCGGGCGGAGA |
| siRNA 1168 | 1168 | CUCCGCCCGGCCGCCCAUC | 3615 | GAUGGGCGGCCGGGCGGAG |
| siRNA 1169 | 1169 | UCCGCCCGGCCGCCCAUCU | 3616 | AGAUGGGCGGCCGGGCGGA |
| siRNA 1170 | 1170 | CCGCCCGGCCGCCCAUCUU | 3617 | AAGAUGGGCGGCCGGGCGG |
| siRNA 1171 | 1171 | CGCCCGGCCGCCCAUCUUC | 3618 | GAAGAUGGGCGGCCGGGCG |
| siRNA 1172 | 1172 | GCCCGGCCGCCCAUCUUCU | 3619 | AGAAGAUGGGCGGCCGGGC |
| siRNA 1173 | 1173 | CCCGGCCGCCCAUCUUCUG | 3620 | CAGAAGAUGGGCGGCCGGG |
| siRNA 1174 | 1174 | CCGGCCGCCCAUCUUCUGA | 3621 | UCAGAAGAUGGGCGGCCGG |
| siRNA 1175 | 1175 | CGGCCGCCCAUCUUCUGAG | 3622 | CUCAGAAGAUGGGCGGCCG |
| siRNA 1176 | 1176 | GGCCGCCCAUCUUCUGAGA | 3623 | UCUCAGAAGAUGGGCGGCC |
| siRNA 1177 | 1177 | GCCGCCCAUCUUCUGAGAU | 3624 | AUCUCAGAAGAUGGGCGGC |
| siRNA 1178 | 1178 | CCGCCCAUCUUCUGAGAUG | 3625 | CAUCUCAGAAGAUGGGCGG |
| siRNA 1179 | 1179 | CGCCCAUCUUCUGAGAUGU | 3626 | ACAUCUCAGAAGAUGGGCG |
| siRNA 1180 | 1180 | GCCCAUCUUCUGAGAUGUG | 3627 | CACAUCUCAGAAGAUGGGC |
| siRNA 1181 | 1181 | CCCAUCUUCUGAGAUGUGG | 3628 | CCACAUCUCAGAAGAUGGG |
| siRNA 1182 | 1182 | CCAUCUUCUGAGAUGUGGG | 3629 | CCCACAUCUCAGAAGAUGG |
| siRNA 1183 | 1183 | CAUCUUCUGAGAUGUGGGG | 3630 | CCCCACAUCUCAGAAGAUG |
| siRNA 1184 | 1184 | AUCUUCUGAGAUGUGGGGA | 3631 | UCCCCACAUCUCAGAAGAU |
| siRNA 1185 | 1185 | UCUUCUGAGAUGUGGGGAG | 3632 | CUCCCCACAUCUCAGAAGA |
| siRNA 1186 | 1186 | CUUCUGAGAUGUGGGGAGC | 3633 | GCUCCCCACAUCUCAGAAG |
| siRNA 1187 | 1187 | UUCUGAGAUGUGGGGAGCG | 3634 | CGCUCCCCACAUCUCAGAA |
| siRNA 1188 | 1188 | UCUGAGAUGUGGGGAGCGC | 3635 | GCGCUCCCCACAUCUCAGA |
| siRNA 1189 | 1189 | CUGAGAUGUGGGGAGCGCC | 3636 | GGCGCUCCCCACAUCUCAG |
| siRNA 1190 | 1190 | UGAGAUGUGGGGAGCGCCU | 3637 | AGGCGCUCCCCACAUCUCA |
| siRNA 1191 | 1191 | GAGAUGUGGGGAGCGCCUU | 3638 | AAGGCGCUCCCCACAUCUC |
| siRNA 1192 | 1192 | AGAUGUGGGGAGCGCCUUU | 3639 | AAAGGCGCUCCCCACAUCU |
| siRNA 1193 | 1193 | GAUGUGGGGAGCGCCUUUG | 3640 | CAAAGGCGCUCCCCACAUC |
| siRNA 1194 | 1194 | AUGUGGGGAGCGCCUUUGC | 3641 | GCAAAGGCGCUCCCCACAU |
| siRNA 1195 | 1195 | UGUGGGGAGCGCCUUUGCC | 3642 | GGCAAAGGCGCUCCCCACA |
| siRNA 1196 | 1196 | GUGGGGAGCGCCUUUGCCC | 3643 | GGGCAAAGGCGCUCCCCAC |
| siRNA 1197 | 1197 | UGGGGAGCGCCUUUGCCCC | 3644 | GGGGCAAAGGCGCUCCCCA |
| siRNA 1198 | 1198 | GGGGAGCGCCUUUGCCCCA | 3645 | UGGGGCAAAGGCGCUCCCC |
| siRNA 1199 | 1199 | GGGAGCGCCUUUGCCCCAC | 3646 | GUGGGGCAAAGGCGCUCCC |
| siRNA 1200 | 1200 | GGAGCGCCUUUGCCCCACC | 3647 | GGUGGGGCAAAGGCGCUCC |
| siRNA 1201 | 1201 | GAGCGCCUUUGCCCCACCG | 3648 | CGGUGGGGCAAAGGCGCUC |
| siRNA 1202 | 1202 | AGCGCCUUUGCCCCACCGC | 3649 | GCGGUGGGGCAAAGGCGCU |
| siRNA 1203 | 1203 | GCGCCUUUGCCCCACCGCC | 3650 | GGCGGUGGGGCAAAGGCGC |
| siRNA 1204 | 1204 | CGCCUUUGCCCCACCGCCC | 3651 | GGGCGGUGGGGCAAAGGCG |
| siRNA 1205 | 1205 | GCCUUUGCCCCACCGCCCU | 3652 | AGGGCGGUGGGGCAAAGGC |
| siRNA 1206 | 1206 | CCUUUGCCCCACCGCCCUG | 3653 | CAGGGCGGUGGGGCAAAGG |
| siRNA 1207 | 1207 | CUUUGCCCCACCGCCCUGU | 3654 | ACAGGGCGGUGGGGCAAAG |
| siRNA 1208 | 1208 | UUUGCCCCACCGCCCUGUC | 3655 | GACAGGGCGGUGGGGCAAA |
| siRNA 1209 | 1209 | UUGCCCCACCGCCCUGUCU | 3656 | AGACAGGGCGGUGGGGCAA |
| siRNA 1210 | 1210 | UGCCCCACCGCCCUGUCUG | 3657 | CAGACAGGGCGGUGGGGCA |
| siRNA 1211 | 1211 | GCCCCACCGCCCUGUCUGG | 3658 | CCAGACAGGGCGGUGGGGC |
| siRNA 1212 | 1212 | CCCCACCGCCCUGUCUGGG | 3659 | CCCAGACAGGGCGGUGGGG |
| siRNA 1213 | 1213 | CCCACCGCCCUGUCUGGGA | 3660 | UCCCAGACAGGGCGGUGGG |
| siRNA 1214 | 1214 | CCACCGCCCUGUCUGGGAU | 3661 | AUCCCAGACAGGGCGGUGG |
| siRNA 1215 | 1215 | CACCGCCCUGUCUGGGAUG | 3662 | CAUCCCAGACAGGGCGGUG |
| siRNA 1216 | 1216 | ACCGCCCUGUCUGGGAUGU | 3663 | ACAUCCCAGACAGGGCGGU |
| siRNA 1217 | 1217 | CCGCCCUGUCUGGGAUGUG | 3664 | CACAUCCCAGACAGGGCGG |
| siRNA 1218 | 1218 | CGCCCUGUCUGGGAUGUGA | 3665 | UCACAUCCCAGACAGGGCG |
| siRNA 1219 | 1219 | GCCCUGUCUGGGAUGUGAG | 3666 | CUCACAUCCCAGACAGGGC |
| siRNA 1220 | 1220 | CCCUGUCUGGGAUGUGAGG | 3667 | CCUCACAUCCCAGACAGGG |
| siRNA 1221 | 1221 | CCUGUCUGGGAUGUGAGGA | 3668 | UCCUCACAUCCCAGACAGG |
| siRNA 1222 | 1222 | CUGUCUGGGAUGUGAGGAG | 3669 | CUCCUCACAUCCCAGACAG |
| siRNA 1223 | 1223 | UGUCUGGGAUGUGAGGAGC | 3670 | GCUCCUCACAUCCCAGACA |
| siRNA 1224 | 1224 | GUCUGGGAUGUGAGGAGCA | 3671 | UGCUCCUCACAUCCCAGAC |
| siRNA 1225 | 1225 | UCUGGGAUGUGAGGAGCAC | 3672 | GUGCUCCUCACAUCCCAGA |
| siRNA 1226 | 1226 | CUGGGAUGUGAGGAGCACC | 3673 | GGUGCUCCUCACAUCCCAG |
| siRNA 1227 | 1227 | UGGGAUGUGAGGAGCACCU | 3674 | AGGUGCUCCUCACAUCCCA |
| siRNA 1228 | 1228 | GGGAUGUGAGGAGCACCUC | 3675 | GAGGUGCUCCUCACAUCCC |
| siRNA 1229 | 1229 | GGAUGUGAGGAGCACCUCU | 3676 | AGAGGUGCUCCUCACAUCC |
| siRNA 1230 | 1230 | GAUGUGAGGAGCACCUCUG | 3677 | CAGAGGUGCUCCUCACAUC |
| siRNA 1231 | 1231 | AUGUGAGGAGCACCUCUGC | 3678 | GCAGAGGUGCUCCUCACAU |
| siRNA 1232 | 1232 | UGUGAGGAGCACCUCUGCC | 3679 | GGCAGAGGUGCUCCUCACA |
| siRNA 1233 | 1233 | GUGAGGAGCACCUCUGCCC | 3680 | GGGCAGAGGUGCUCCUCAC |
| siRNA 1234 | 1234 | UGAGGAGCACCUCUGCCCG | 3681 | CGGGCAGAGGUGCUCCUCA |
| siRNA 1235 | 1235 | GAGGAGCACCUCUGCCCGG | 3682 | CCGGGCAGAGGUGCUCCUC |
| siRNA 1236 | 1236 | AGGAGCACCUCUGCCCGGC | 3683 | GCCGGGCAGAGGUGCUCCU |
| siRNA 1237 | 1237 | GGAGCACCUCUGCCCGGCC | 3684 | GGCCGGGCAGAGGUGCUCC |
| siRNA 1238 | 1238 | GAGCACCUCUGCCCGGCCG | 3685 | CGGCCGGGCAGAGGUGCUC |
| siRNA 1239 | 1239 | AGCACCUCUGCCCGGCCGC | 3686 | GCGGCCGGGCAGAGGUGCU |
| siRNA 1240 | 1240 | GCACCUCUGCCCGGCCGCG | 3687 | CGCGGCCGGGCAGAGGUGC |
| siRNA 1241 | 1241 | CACCUCUGCCCGGCCGCGA | 3688 | UCGCGGCCGGGCAGAGGUG |
| siRNA 1242 | 1242 | ACCUCUGCCCGGCCGCGAC | 3689 | GUCGCGGCCGGGCAGAGGU |
| siRNA 1243 | 1243 | CCUCUGCCCGGCCGCGACC | 3690 | GGUCGCGGCCGGGCAGAGG |
| siRNA 1244 | 1244 | CUCUGCCCGGCCGCGACCC | 3691 | GGGUCGCGGCCGGGCAGAG |
| siRNA 1245 | 1245 | UCUGCCCGGCCGCGACCCC | 3692 | GGGGUCGCGGCCGGGCAGA |
| siRNA 1246 | 1246 | CUGCCCGGCCGCGACCCCG | 3693 | CGGGGUCGCGGCCGGGCAG |
| siRNA 1247 | 1247 | UGCCCGGCCGCGACCCCGU | 3694 | ACGGGGUCGCGGCCGGGCA |
| siRNA 1248 | 1248 | GCCCGGCCGCGACCCCGUC | 3695 | GACGGGGUCGCGGCCGGGC |
| siRNA 1249 | 1249 | CCCGGCCGCGACCCCGUCU | 3696 | AGACGGGGUCGCGGCCGGG |
| siRNA 1250 | 1250 | CCGGCCGCGACCCCGUCUG | 3697 | CAGACGGGGUCGCGGCCGG |
| siRNA 1251 | 1251 | CGGCCGCGACCCCGUCUGG | 3698 | CCAGACGGGGUCGCGGCCG |
| siRNA 1252 | 1252 | GGCCGCGACCCCGUCUGGG | 3699 | CCCAGACGGGGUCGCGGCC |
| siRNA 1253 | 1253 | GCCGCGACCCCGUCUGGGA | 3700 | UCCCAGACGGGGUCGCGGC |
| siRNA 1254 | 1254 | CCGCGACCCCGUCUGGGAG | 3701 | CUCCCAGACGGGGUCGCGG |
| siRNA 1255 | 1255 | CGCGACCCCGUCUGGGAGG | 3702 | CCUCCCAGACGGGGUCGCG |
| siRNA 1256 | 1256 | GCGACCCCGUCUGGGAGGU | 3703 | ACCUCCCAGACGGGGUCGC |
| siRNA 1257 | 1257 | CGACCCCGUCUGGGAGGUG | 3704 | CACCUCCCAGACGGGGUCG |
| siRNA 1258 | 1258 | GACCCCGUCUGGGAGGUGA | 3705 | UCACCUCCCAGACGGGGUC |
| siRNA 1259 | 1259 | ACCCCGUCUGGGAGGUGAG | 3706 | CUCACCUCCCAGACGGGGU |
| siRNA 1260 | 1260 | CCCCGUCUGGGAGGUGAGG | 3707 | CCUCACCUCCCAGACGGGG |
| siRNA 1261 | 1261 | CCCGUCUGGGAGGUGAGGA | 3708 | UCCUCACCUCCCAGACGGG |
| siRNA 1262 | 1262 | CCGUCUGGGAGGUGAGGAG | 3709 | CUCCUCACCUCCCAGACGG |
| siRNA 1263 | 1263 | CGUCUGGGAGGUGAGGAGC | 3710 | GCUCCUCACCUCCCAGACG |
| siRNA 1264 | 1264 | GUCUGGGAGGUGAGGAGCG | 3711 | CGCUCCUCACCUCCCAGAC |
| siRNA 1265 | 1265 | UCUGGGAGGUGAGGAGCGU | 3712 | ACGCUCCUCACCUCCCAGA |
| siRNA 1266 | 1266 | CUGGGAGGUGAGGAGCGUC | 3713 | GACGCUCCUCACCUCCCAG |
| siRNA 1267 | 1267 | UGGGAGGUGAGGAGCGUCU | 3714 | AGACGCUCCUCACCUCCCA |
| siRNA 1268 | 1268 | GGGAGGUGAGGAGCGUCUC | 3715 | GAGACGCUCCUCACCUCCC |
| siRNA 1269 | 1269 | GGAGGUGAGGAGCGUCUCU | 3716 | AGAGACGCUCCUCACCUCC |
| siRNA 1270 | 1270 | GAGGUGAGGAGCGUCUCUG | 3717 | CAGAGACGCUCCUCACCUC |
| siRNA 1271 | 1271 | AGGUGAGGAGCGUCUCUGC | 3718 | GCAGAGACGCUCCUCACCU |
| siRNA 1272 | 1272 | GGUGAGGAGCGUCUCUGCC | 3719 | GGCAGAGACGCUCCUCACC |
| siRNA 1273 | 1273 | GUGAGGAGCGUCUCUGCCC | 3720 | GGGCAGAGACGCUCCUCAC |
| siRNA 1274 | 1274 | UGAGGAGCGUCUCUGCCCA | 3721 | UGGGCAGAGACGCUCCUCA |
| siRNA 1275 | 1275 | GAGGAGCGUCUCUGCCCAG | 3722 | CUGGGCAGAGACGCUCCUC |
| siRNA 1276 | 1276 | AGGAGCGUCUCUGCCCAGC | 3723 | GCUGGGCAGAGACGCUCCU |
| siRNA 1277 | 1277 | GGAGCGUCUCUGCCCAGCC | 3724 | GGCUGGGCAGAGACGCUCC |
| siRNA 1278 | 1278 | GAGCGUCUCUGCCCAGCCG | 3725 | CGGCUGGGCAGAGACGCUC |
| siRNA 1279 | 1279 | AGCGUCUCUGCCCAGCCGC | 3726 | GCGGCUGGGCAGAGACGCU |
| siRNA 1280 | 1280 | GCGUCUCUGCCCAGCCGCC | 3727 | GGCGGCUGGGCAGAGACGC |
| siRNA 1281 | 1281 | CGUCUCUGCCCAGCCGCCC | 3728 | GGGCGGCUGGGCAGAGACG |
| siRNA 1282 | 1282 | GUCUCUGCCCAGCCGCCCC | 3729 | GGGGCGGCUGGGCAGAGAC |
| siRNA 1283 | 1283 | UCUCUGCCCAGCCGCCCCA | 3730 | UGGGGCGGCUGGGCAGAGA |
| siRNA 1284 | 1284 | CUCUGCCCAGCCGCCCCAU | 3731 | AUGGGGCGGCUGGGCAGAG |
| siRNA 1285 | 1285 | UCUGCCCAGCCGCCCCAUC | 3732 | GAUGGGGCGGCUGGGCAGA |
| siRNA 1286 | 1286 | CUGCCCAGCCGCCCCAUCU | 3733 | AGAUGGGGCGGCUGGGCAG |
| siRNA 1287 | 1287 | UGCCCAGCCGCCCCAUCUG | 3734 | CAGAUGGGGCGGCUGGGCA |
| siRNA 1288 | 1288 | GCCCAGCCGCCCCAUCUGA | 3735 | UCAGAUGGGGCGGCUGGGC |
| siRNA 1289 | 1289 | CCCAGCCGCCCCAUCUGAG | 3736 | CUCAGAUGGGGCGGCUGGG |
| siRNA 1290 | 1290 | CCAGCCGCCCCAUCUGAGA | 3737 | UCUCAGAUGGGGCGGCUGG |
| siRNA 1291 | 1291 | CAGCCGCCCCAUCUGAGAA | 3738 | UUCUCAGAUGGGGCGGCUG |
| siRNA 1292 | 1292 | AGCCGCCCCAUCUGAGAAG | 3739 | CUUCUCAGAUGGGGCGGCU |
| siRNA 1293 | 1293 | GCCGCCCCAUCUGAGAAGG | 3740 | CCUUCUCAGAUGGGGCGGC |
| siRNA 1294 | 1294 | CCGCCCCAUCUGAGAAGGG | 3741 | CCCUUCUCAGAUGGGGCGG |
| siRNA 1295 | 1295 | CGCCCCAUCUGAGAAGGGA | 3742 | UCCCUUCUCAGAUGGGGCG |
| siRNA 1296 | 1296 | GCCCCAUCUGAGAAGGGAG | 3743 | CUCCCUUCUCAGAUGGGGC |
| siRNA 1297 | 1297 | CCCCAUCUGAGAAGGGAGG | 3744 | CCUCCCUUCUCAGAUGGGG |
| siRNA 1298 | 1298 | CCCAUCUGAGAAGGGAGGA | 3745 | UCCUCCCUUCUCAGAUGGG |
| siRNA 1299 | 1299 | CCAUCUGAGAAGGGAGGAG | 3746 | CUCCUCCCUUCUCAGAUGG |
| siRNA 1300 | 1300 | CAUCUGAGAAGGGAGGAGA | 3747 | UCUCCUCCCUUCUCAGAUG |
| siRNA 1301 | 1301 | AUCUGAGAAGGGAGGAGAC | 3748 | GUCUCCUCCCUUCUCAGAU |
| siRNA 1302 | 1302 | UCUGAGAAGGGAGGAGACC | 3749 | GGUCUCCUCCCUUCUCAGA |
| siRNA 1303 | 1303 | CUGAGAAGGGAGGAGACCC | 3750 | GGGUCUCCUCCCUUCUCAG |
| siRNA 1304 | 1304 | UGAGAAGGGAGGAGACCCU | 3751 | AGGGUCUCCUCCCUUCUCA |
| siRNA 1305 | 1305 | GAGAAGGGAGGAGACCCUC | 3752 | GAGGGUCUCCUCCCUUCUC |
| siRNA 1306 | 1306 | AGAAGGGAGGAGACCCUCC | 3753 | GGAGGGUCUCCUCCCUUCU |
| siRNA 1307 | 1307 | GAAGGGAGGAGACCCUCCG | 3754 | CGGAGGGUCUCCUCCCUUC |
| siRNA 1308 | 1308 | AAGGGAGGAGACCCUCCGC | 3755 | GCGGAGGGUCUCCUCCCUU |
| siRNA 1309 | 1309 | AGGGAGGAGACCCUCCGCC | 3756 | GGCGGAGGGUCUCCUCCCU |
| siRNA 1310 | 1310 | GGGAGGAGACCCUCCGCCU | 3757 | AGGCGGAGGGUCUCCUCCC |
| siRNA 1311 | 1311 | GGAGGAGACCCUCCGCCUG | 3758 | CAGGCGGAGGGUCUCCUCC |
| siRNA 1312 | 1312 | GAGGAGACCCUCCGCCUGG | 3759 | CCAGGCGGAGGGUCUCCUC |
| siRNA 1313 | 1313 | AGGAGACCCUCCGCCUGGC | 3760 | GCCAGGCGGAGGGUCUCCU |
| siRNA 1314 | 1314 | GGAGACCCUCCGCCUGGCA | 3761 | UGCCAGGCGGAGGGUCUCC |
| siRNA 1315 | 1315 | GAGACCCUCCGCCUGGCAA | 3762 | UUGCCAGGCGGAGGGUCUC |
| siRNA 1316 | 1316 | AGACCCUCCGCCUGGCAAC | 3763 | GUUGCCAGGCGGAGGGUCU |
| siRNA 1317 | 1317 | GACCCUCCGCCUGGCAACC | 3764 | GGUUGCCAGGCGGAGGGUC |
| siRNA 1318 | 1318 | ACCCUCCGCCUGGCAACCG | 3765 | CGGUUGCCAGGCGGAGGGU |
| siRNA 1319 | 1319 | CCCUCCGCCUGGCAACCGC | 3766 | GCGGUUGCCAGGCGGAGGG |
| siRNA 1320 | 1320 | CCUCCGCCUGGCAACCGCC | 3767 | GGCGGUUGCCAGGCGGAGG |
| siRNA 1321 | 1321 | CUCCGCCUGGCAACCGCCC | 3768 | GGGCGGUUGCCAGGCGGAG |
| siRNA 1322 | 1322 | UCCGCCUGGCAACCGCCCC | 3769 | GGGGCGGUUGCCAGGCGGA |
| siRNA 1323 | 1323 | CCGCCUGGCAACCGCCCCG | 3770 | CGGGGCGGUUGCCAGGCGG |
| siRNA 1324 | 1324 | CGCCUGGCAACCGCCCCGU | 3771 | ACGGGGCGGUUGCCAGGCG |
| siRNA 1325 | 1325 | GCCUGGCAACCGCCCCGUC | 3772 | GACGGGGCGGUUGCCAGGC |
| siRNA 1326 | 1326 | CCUGGCAACCGCCCCGUCU | 3773 | AGACGGGGCGGUUGCCAGG |
| siRNA 1327 | 1327 | CUGGCAACCGCCCCGUCUG | 3774 | CAGACGGGGCGGUUGCCAG |
| siRNA 1328 | 1328 | UGGCAACCGCCCCGUCUGA | 3775 | UCAGACGGGGCGGUUGCCA |
| siRNA 1329 | 1329 | GGCAACCGCCCCGUCUGAG | 3776 | CUCAGACGGGGCGGUUGCC |
| siRNA 1330 | 1330 | GCAACCGCCCCGUCUGAGA | 3777 | UCUCAGACGGGGCGGUUGC |
| siRNA 1331 | 1331 | CAACCGCCCCGUCUGAGAA | 3778 | UUCUCAGACGGGGCGGUUG |
| siRNA 1332 | 1332 | AACCGCCCCGUCUGAGAAG | 3779 | CUUCUCAGACGGGGCGGUU |
| siRNA 1333 | 1333 | ACCGCCCCGUCUGAGAAGU | 3780 | ACUUCUCAGACGGGGCGGU |
| siRNA 1334 | 1334 | CCGCCCCGUCUGAGAAGUG | 3781 | CACUUCUCAGACGGGGCGG |
| siRNA 1335 | 1335 | CGCCCCGUCUGAGAAGUGA | 3782 | UCACUUCUCAGACGGGGCG |
| siRNA 1336 | 1336 | GCCCCGUCUGAGAAGUGAG | 3783 | CUCACUUCUCAGACGGGGC |
| siRNA 1337 | 1337 | CCCCGUCUGAGAAGUGAGG | 3784 | CCUCACUUCUCAGACGGGG |
| siRNA 1338 | 1338 | CCCGUCUGAGAAGUGAGGA | 3785 | UCCUCACUUCUCAGACGGG |
| siRNA 1339 | 1339 | CCGUCUGAGAAGUGAGGAG | 3786 | CUCCUCACUUCUCAGACGG |
| siRNA 1340 | 1340 | CGUCUGAGAAGUGAGGAGC | 3787 | GCUCCUCACUUCUCAGACG |
| siRNA 1341 | 1341 | GUCUGAGAAGUGAGGAGCC | 3788 | GGCUCCUCACUUCUCAGAC |
| siRNA 1342 | 1342 | UCUGAGAAGUGAGGAGCCC | 3789 | GGGCUCCUCACUUCUCAGA |
| siRNA 1343 | 1343 | CUGAGAAGUGAGGAGCCCC | 3790 | GGGGCUCCUCACUUCUCAG |
| siRNA 1344 | 1344 | UGAGAAGUGAGGAGCCCCU | 3791 | AGGGGCUCCUCACUUCUCA |
| siRNA 1345 | 1345 | GAGAAGUGAGGAGCCCCUC | 3792 | GAGGGGCUCCUCACUUCUC |
| siRNA 1346 | 1346 | AGAAGUGAGGAGCCCCUCC | 3793 | GGAGGGGCUCCUCACUUCU |
| siRNA 1347 | 1347 | GAAGUGAGGAGCCCCUCCG | 3794 | CGGAGGGGCUCCUCACUUC |
| siRNA 1348 | 1348 | AAGUGAGGAGCCCCUCCGC | 3795 | GCGGAGGGGCUCCUCACUU |
| siRNA 1349 | 1349 | AGUGAGGAGCCCCUCCGCC | 3796 | GGCGGAGGGGCUCCUCACU |
| siRNA 1350 | 1350 | GUGAGGAGCCCCUCCGCCC | 3797 | GGGCGGAGGGGCUCCUCAC |
| siRNA 1351 | 1351 | UGAGGAGCCCCUCCGCCCG | 3798 | CGGGCGGAGGGGCUCCUCA |
| siRNA 1352 | 1352 | GAGGAGCCCCUCCGCCCGG | 3799 | CCGGGCGGAGGGGCUCCUC |
| siRNA 1353 | 1353 | AGGAGCCCCUCCGCCCGGC | 3800 | GCCGGGCGGAGGGGCUCCU |
| siRNA 1354 | 1354 | GGAGCCCCUCCGCCCGGCA | 3801 | UGCCGGGCGGAGGGGCUCC |
| siRNA 1355 | 1355 | GAGCCCCUCCGCCCGGCAG | 3802 | CUGCCGGGCGGAGGGGCUC |
| siRNA 1356 | 1356 | AGCCCCUCCGCCCGGCAGC | 3803 | GCUGCCGGGCGGAGGGGCU |
| siRNA 1357 | 1357 | GCCCCUCCGCCCGGCAGCC | 3804 | GGCUGCCGGGCGGAGGGGC |
| siRNA 1358 | 1358 | CCCCUCCGCCCGGCAGCCA | 3805 | UGGCUGCCGGGCGGAGGGG |
| siRNA 1359 | 1359 | CCCUCCGCCCGGCAGCCAC | 3806 | GUGGCUGCCGGGCGGAGGG |
| siRNA 1360 | 1360 | CCUCCGCCCGGCAGCCACC | 3807 | GGUGGCUGCCGGGCGGAGG |
| siRNA 1361 | 1361 | CUCCGCCCGGCAGCCACCC | 3808 | GGGUGGCUGCCGGGCGGAG |
| siRNA 1362 | 1362 | UCCGCCCGGCAGCCACCCC | 3809 | GGGGUGGCUGCCGGGCGGA |
| siRNA 1363 | 1363 | CCGCCCGGCAGCCACCCCG | 3810 | CGGGGUGGCUGCCGGGCGG |
| siRNA 1364 | 1364 | CGCCCGGCAGCCACCCCGU | 3811 | ACGGGGUGGCUGCCGGGCG |
| siRNA 1365 | 1365 | GCCCGGCAGCCACCCCGUC | 3812 | GACGGGGUGGCUGCCGGGC |
| siRNA 1366 | 1366 | CCCGGCAGCCACCCCGUCU | 3813 | AGACGGGGUGGCUGCCGGG |
| siRNA 1367 | 1367 | CCGGCAGCCACCCCGUCUG | 3814 | CAGACGGGGUGGCUGCCGG |
| siRNA 1368 | 1368 | CGGCAGCCACCCCGUCUGG | 3815 | CCAGACGGGGUGGCUGCCG |
| siRNA 1369 | 1369 | GGCAGCCACCCCGUCUGGG | 3816 | CCCAGACGGGGUGGCUGCC |
| siRNA 1370 | 1370 | GCAGCCACCCCGUCUGGGA | 3817 | UCCCAGACGGGGUGGCUGC |
| siRNA 1371 | 1371 | CAGCCACCCCGUCUGGGAA | 3818 | UUCCCAGACGGGGUGGCUG |
| siRNA 1372 | 1372 | AGCCACCCCGUCUGGGAAG | 3819 | CUUCCCAGACGGGGUGGCU |
| siRNA 1373 | 1373 | GCCACCCCGUCUGGGAAGU | 3820 | ACUUCCCAGACGGGGUGGC |
| siRNA 1374 | 1374 | CCACCCCGUCUGGGAAGUG | 3821 | CACUUCCCAGACGGGGUGG |
| siRNA 1375 | 1375 | CACCCCGUCUGGGAAGUGA | 3822 | UCACUUCCCAGACGGGGUG |
| siRNA 1376 | 1376 | ACCCCGUCUGGGAAGUGAG | 3823 | CUCACUUCCCAGACGGGGU |
| siRNA 1377 | 1377 | CCCCGUCUGGGAAGUGAGG | 3824 | CCUCACUUCCCAGACGGGG |
| siRNA 1378 | 1378 | CCCGUCUGGGAAGUGAGGA | 3825 | UCCUCACUUCCCAGACGGG |
| siRNA 1379 | 1379 | CCGUCUGGGAAGUGAGGAG | 3826 | CUCCUCACUUCCCAGACGG |
| siRNA 1380 | 1380 | CGUCUGGGAAGUGAGGAGC | 3827 | GCUCCUCACUUCCCAGACG |
| siRNA 1381 | 1381 | GUCUGGGAAGUGAGGAGCG | 3828 | CGCUCCUCACUUCCCAGAC |
| siRNA 1382 | 1382 | UCUGGGAAGUGAGGAGCGU | 3829 | ACGCUCCUCACUUCCCAGA |
| siRNA 1383 | 1383 | CUGGGAAGUGAGGAGCGUC | 3830 | GACGCUCCUCACUUCCCAG |
| siRNA 1384 | 1384 | UGGGAAGUGAGGAGCGUCU | 3831 | AGACGCUCCUCACUUCCCA |
| siRNA 1385 | 1385 | GGGAAGUGAGGAGCGUCUC | 3832 | GAGACGCUCCUCACUUCCC |
| siRNA 1386 | 1386 | GGAAGUGAGGAGCGUCUCC | 3833 | GGAGACGCUCCUCACUUCC |
| siRNA 1387 | 1387 | GAAGUGAGGAGCGUCUCCG | 3834 | CGGAGACGCUCCUCACUUC |
| siRNA 1388 | 1388 | AAGUGAGGAGCGUCUCCGC | 3835 | GCGGAGACGCUCCUCACUU |
| siRNA 1389 | 1389 | AGUGAGGAGCGUCUCCGCC | 3836 | GGCGGAGACGCUCCUCACU |
| siRNA 1390 | 1390 | GUGAGGAGCGUCUCCGCCA | 3837 | UGGCGGAGACGCUCCUCAC |
| siRNA 1391 | 1391 | UGAGGAGCGUCUCCGCCAG | 3838 | CUGGCGGAGACGCUCCUCA |
| siRNA 1392 | 1392 | GAGGAGCGUCUCCGCCAGG | 3839 | CCUGGCGGAGACGCUCCUC |
| siRNA 1393 | 1393 | AGGAGCGUCUCCGCCAGGC | 3840 | GCCUGGCGGAGACGCUCCU |
| siRNA 1394 | 1394 | GGAGCGUCUCCGCCAGGCA | 3841 | UGCCUGGCGGAGACGCUCC |
| siRNA 1395 | 1395 | GAGCGUCUCCGCCAGGCAG | 3842 | CUGCCUGGCGGAGACGCUC |
| siRNA 1396 | 1396 | AGCGUCUCCGCCAGGCAGC | 3843 | GCUGCCUGGCGGAGACGCU |
| siRNA 1397 | 1397 | GCGUCUCCGCCAGGCAGCC | 3844 | GGCUGCCUGGCGGAGACGC |
| siRNA 1398 | 1398 | CGUCUCCGCCAGGCAGCCA | 3845 | UGGCUGCCUGGCGGAGACG |
| siRNA 1399 | 1399 | GUCUCCGCCAGGCAGCCAC | 3846 | GUGGCUGCCUGGCGGAGAC |
| siRNA 1400 | 1400 | UCUCCGCCAGGCAGCCACC | 3847 | GGUGGCUGCCUGGCGGAGA |
| siRNA 1401 | 1401 | CUCCGCCAGGCAGCCACCC | 3848 | GGGUGGCUGCCUGGCGGAG |
| siRNA 1402 | 1402 | UCCGCCAGGCAGCCACCCC | 3849 | GGGGUGGCUGCCUGGCGGA |
| siRNA 1403 | 1403 | CCGCCAGGCAGCCACCCCG | 3850 | CGGGGUGGCUGCCUGGCGG |
| siRNA 1404 | 1404 | CGCCAGGCAGCCACCCCGU | 3851 | ACGGGGUGGCUGCCUGGCG |
| siRNA 1405 | 1405 | GCCAGGCAGCCACCCCGUC | 3852 | GACGGGGUGGCUGCCUGGC |
| siRNA 1406 | 1406 | CCAGGCAGCCACCCCGUCC | 3853 | GGACGGGGUGGCUGCCUGG |
| siRNA 1407 | 1407 | CAGGCAGCCACCCCGUCCG | 3854 | CGGACGGGGUGGCUGCCUG |
| siRNA 1408 | 1408 | AGGCAGCCACCCCGUCCGG | 3855 | CCGGACGGGGUGGCUGCCU |
| siRNA 1409 | 1409 | GGCAGCCACCCCGUCCGGG | 3856 | CCCGGACGGGGUGGCUGCC |
| siRNA 1410 | 1410 | GCAGCCACCCCGUCCGGGA | 3857 | UCCCGGACGGGGUGGCUGC |
| siRNA 1411 | 1411 | CAGCCACCCCGUCCGGGAG | 3858 | CUCCCGGACGGGGUGGCUG |
| siRNA 1412 | 1412 | AGCCACCCCGUCCGGGAGG | 3859 | CCUCCCGGACGGGGUGGCU |
| siRNA 1413 | 1413 | GCCACCCCGUCCGGGAGGG | 3860 | CCCUCCCGGACGGGGUGGC |
| siRNA 1414 | 1414 | CCACCCCGUCCGGGAGGGA | 3861 | UCCCUCCCGGACGGGGUGG |
| siRNA 1415 | 1415 | CACCCCGUCCGGGAGGGAG | 3862 | CUCCCUCCCGGACGGGGUG |
| siRNA 1416 | 1416 | ACCCCGUCCGGGAGGGAGG | 3863 | CCUCCCUCCCGGACGGGGU |
| siRNA 1417 | 1417 | CCCCGUCCGGGAGGGAGGU | 3864 | ACCUCCCUCCCGGACGGGG |
| siRNA 1418 | 1418 | CCCGUCCGGGAGGGAGGUG | 3865 | CACCUCCCUCCCGGACGGG |
| siRNA 1419 | 1419 | CCGUCCGGGAGGGAGGUGG | 3866 | CCACCUCCCUCCCGGACGG |
| siRNA 1420 | 1420 | CGUCCGGGAGGGAGGUGGG | 3867 | CCCACCUCCCUCCCGGACG |
| siRNA 1421 | 1421 | GUCCGGGAGGGAGGUGGGG | 3868 | CCCCACCUCCCUCCCGGAC |
| siRNA 1422 | 1422 | UCCGGGAGGGAGGUGGGGG | 3869 | CCCCCACCUCCCUCCCGGA |
| siRNA 1423 | 1423 | CCGGGAGGGAGGUGGGGGU | 3870 | ACCCCCACCUCCCUCCCGG |
| siRNA 1424 | 1424 | CGGGAGGGAGGUGGGGGUC | 3871 | GACCCCCACCUCCCUCCCG |
| siRNA 1425 | 1425 | GGGAGGGAGGUGGGGGUCA | 3872 | UGACCCCCACCUCCCUCCC |
| siRNA 1426 | 1426 | GGAGGGAGGUGGGGGUCAG | 3873 | CUGACCCCCACCUCCCUCC |
| siRNA 1427 | 1427 | GAGGGAGGUGGGGGUCAGC | 3874 | GCUGACCCCCACCUCCCUC |
| siRNA 1428 | 1428 | AGGGAGGUGGGGGUCAGCC | 3875 | GGCUGACCCCCACCUCCCU |
| siRNA 1429 | 1429 | GGGAGGUGGGGGUCAGCCC | 3876 | GGGCUGACCCCCACCUCCC |
| siRNA 1430 | 1430 | GGAGGUGGGGGUCAGCCCC | 3877 | GGGGCUGACCCCCACCUCC |
| siRNA 1431 | 1431 | GAGGUGGGGGUCAGCCCCC | 3878 | GGGGGCUGACCCCCACCUC |
| siRNA 1432 | 1432 | AGGUGGGGGUCAGCCCCCG | 3879 | CGGGGGCUGACCCCCACCU |
| siRNA 1433 | 1433 | GGUGGGGGUCAGCCCCCGC | 3880 | GCGGGGGCUGACCCCCACC |
| siRNA 1434 | 1434 | GUGGGGGUCAGCCCCCGCC | 3881 | GGCGGGGGCUGACCCCCAC |
| siRNA 1435 | 1435 | UGGGGGUCAGCCCCCGCCA | 3882 | UGGCGGGGGCUGACCCCCA |
| siRNA 1436 | 1436 | GGGGGUCAGCCCCCGCCAG | 3883 | CUGGCGGGGGCUGACCCCC |
| siRNA 1437 | 1437 | GGGGUCAGCCCCCGCCAGG | 3884 | CCUGGCGGGGGCUGACCCC |
| siRNA 1438 | 1438 | GGGUCAGCCCCCGCCAGGC | 3885 | GCCUGGCGGGGGCUGACCC |
| siRNA 1439 | 1439 | GGUCAGCCCCCGCCAGGCC | 3886 | GGCCUGGCGGGGGCUGACC |
| siRNA 1440 | 1440 | GUCAGCCCCCGCCAGGCCA | 3887 | UGGCCUGGCGGGGGCUGAC |
| siRNA 1441 | 1441 | UCAGCCCCCGCCAGGCCAG | 3888 | CUGGCCUGGCGGGGGCUGA |
| siRNA 1442 | 1442 | CAGCCCCCGCCAGGCCAGC | 3889 | GCUGGCCUGGCGGGGGCUG |
| siRNA 1443 | 1443 | AGCCCCCGCCAGGCCAGCU | 3890 | AGCUGGCCUGGCGGGGGCU |
| siRNA 1444 | 1444 | GCCCCCGCCAGGCCAGCUG | 3891 | CAGCUGGCCUGGCGGGGGC |
| siRNA 1445 | 1445 | CCCCCGCCAGGCCAGCUGC | 3892 | GCAGCUGGCCUGGCGGGGG |
| siRNA 1446 | 1446 | CCCCGCCAGGCCAGCUGCC | 3893 | GGCAGCUGGCCUGGCGGGG |
| siRNA 1447 | 1447 | CCCGCCAGGCCAGCUGCCC | 3894 | GGGCAGCUGGCCUGGCGGG |
| siRNA 1448 | 1448 | CCGCCAGGCCAGCUGCCCC | 3895 | GGGGCAGCUGGCCUGGCGG |
| siRNA 1449 | 1449 | CGCCAGGCCAGCUGCCCCA | 3896 | UGGGGCAGCUGGCCUGGCG |
| siRNA 1450 | 1450 | GCCAGGCCAGCUGCCCCAU | 3897 | AUGGGGCAGCUGGCCUGGC |
| siRNA 1451 | 1451 | CCAGGCCAGCUGCCCCAUC | 3898 | GAUGGGGCAGCUGGCCUGG |
| siRNA 1452 | 1452 | CAGGCCAGCUGCCCCAUCC | 3899 | GGAUGGGGCAGCUGGCCUG |
| siRNA 1453 | 1453 | AGGCCAGCUGCCCCAUCCG | 3900 | CGGAUGGGGCAGCUGGCCU |
| siRNA 1454 | 1454 | GGCCAGCUGCCCCAUCCGG | 3901 | CCGGAUGGGGCAGCUGGCC |
| siRNA 1455 | 1455 | GCCAGCUGCCCCAUCCGGG | 3902 | CCCGGAUGGGGCAGCUGGC |
| siRNA 1456 | 1456 | CCAGCUGCCCCAUCCGGGA | 3903 | UCCCGGAUGGGGCAGCUGG |
| siRNA 1457 | 1457 | CAGCUGCCCCAUCCGGGAG | 3904 | CUCCCGGAUGGGGCAGCUG |
| siRNA 1458 | 1458 | AGCUGCCCCAUCCGGGAGG | 3905 | CCUCCCGGAUGGGGCAGCU |
| siRNA 1459 | 1459 | GCUGCCCCAUCCGGGAGGG | 3906 | CCCUCCCGGAUGGGGCAGC |
| siRNA 1460 | 1460 | CUGCCCCAUCCGGGAGGGA | 3907 | UCCCUCCCGGAUGGGGCAG |
| siRNA 1461 | 1461 | UGCCCCAUCCGGGAGGGAG | 3908 | CUCCCUCCCGGAUGGGGCA |
| siRNA 1462 | 1462 | GCCCCAUCCGGGAGGGAGG | 3909 | CCUCCCUCCCGGAUGGGGC |
| siRNA 1463 | 1463 | CCCCAUCCGGGAGGGAGGU | 3910 | ACCUCCCUCCCGGAUGGGG |
| siRNA 1464 | 1464 | CCCAUCCGGGAGGGAGGUG | 3911 | CACCUCCCUCCCGGAUGGG |
| siRNA 1465 | 1465 | CCAUCCGGGAGGGAGGUGG | 3912 | CCACCUCCCUCCCGGAUGG |
| siRNA 1466 | 1466 | CAUCCGGGAGGGAGGUGGG | 3913 | CCCACCUCCCUCCCGGAUG |
| siRNA 1467 | 1467 | AUCCGGGAGGGAGGUGGGG | 3914 | CCCCACCUCCCUCCCGGAU |
| siRNA 1468 | 1468 | UCCGGGAGGGAGGUGGGGG | 3915 | CCCCCACCUCCCUCCCGGA |
| siRNA 1469 | 1469 | CCGGGAGGGAGGUGGGGGG | 3916 | CCCCCCACCUCCCUCCCGG |
| siRNA 1470 | 1470 | CGGGAGGGAGGUGGGGGGG | 3917 | CCCCCCCACCUCCCUCCCG |
| siRNA 1471 | 1471 | GGGAGGGAGGUGGGGGGGG | 3918 | CCCCCCCCACCUCCCUCCC |
| siRNA 1472 | 1472 | GGAGGGAGGUGGGGGGGGU | 3919 | ACCCCCCCCACCUCCCUCC |
| siRNA 1473 | 1473 | GAGGGAGGUGGGGGGGGUC | 3920 | GACCCCCCCCACCUCCCUC |
| siRNA 1474 | 1474 | AGGGAGGUGGGGGGGGUCA | 3921 | UGACCCCCCCCACCUCCCU |
| siRNA 1475 | 1475 | GGGAGGUGGGGGGGGUCAG | 3922 | CUGACCCCCCCCACCUCCC |
| siRNA 1476 | 1476 | GGAGGUGGGGGGGGUCAGC | 3923 | GCUGACCCCCCCCACCUCC |
| siRNA 1477 | 1477 | GAGGUGGGGGGGGUCAGCC | 3924 | GGCUGACCCCCCCCACCUC |
| siRNA 1478 | 1478 | AGGUGGGGGGGGUCAGCCC | 3925 | GGGCUGACCCCCCCCACCU |
| siRNA 1479 | 1479 | GGUGGGGGGGGUCAGCCCC | 3926 | GGGGCUGACCCCCCCCACC |
| siRNA 1480 | 1480 | GUGGGGGGGGUCAGCCCCC | 3927 | GGGGGCUGACCCCCCCCAC |
| siRNA 1481 | 1481 | UGGGGGGGGUCAGCCCCCC | 3928 | GGGGGGCUGACCCCCCCCA |
| siRNA 1482 | 1482 | GGGGGGGGUCAGCCCCCCG | 3929 | CGGGGGGCUGACCCCCCCC |
| siRNA 1483 | 1483 | GGGGGGGUCAGCCCCCCGC | 3930 | GCGGGGGGCUGACCCCCCC |
| siRNA 1484 | 1484 | GGGGGGUCAGCCCCCCGCC | 3931 | GGCGGGGGGCUGACCCCCC |
| siRNA 1485 | 1485 | GGGGGUCAGCCCCCCGCCC | 3932 | GGGCGGGGGGCUGACCCCC |
| siRNA 1486 | 1486 | GGGGUCAGCCCCCCGCCCG | 3933 | CGGGCGGGGGGCUGACCCC |
| siRNA 1487 | 1487 | GGGUCAGCCCCCCGCCCGG | 3934 | CCGGGCGGGGGGCUGACCC |
| siRNA 1488 | 1488 | GGUCAGCCCCCCGCCCGGC | 3935 | GCCGGGCGGGGGGCUGACC |
| siRNA 1489 | 1489 | GUCAGCCCCCCGCCCGGCC | 3936 | GGCCGGGCGGGGGGCUGAC |
| siRNA 1490 | 1490 | UCAGCCCCCCGCCCGGCCA | 3937 | UGGCCGGGCGGGGGGCUGA |
| siRNA 1491 | 1491 | CAGCCCCCCGCCCGGCCAG | 3938 | CUGGCCGGGCGGGGGGCUG |
| siRNA 1492 | 1492 | AGCCCCCCGCCCGGCCAGC | 3939 | GCUGGCCGGGCGGGGGGCU |
| siRNA 1493 | 1493 | GCCCCCCGCCCGGCCAGCC | 3940 | GGCUGGCCGGGCGGGGGGC |
| siRNA 1494 | 1494 | CCCCCCGCCCGGCCAGCCG | 3941 | CGGCUGGCCGGGCGGGGGG |
| siRNA 1495 | 1495 | CCCCCGCCCGGCCAGCCGC | 3942 | GCGGCUGGCCGGGCGGGGG |
| siRNA 1496 | 1496 | CCCCGCCCGGCCAGCCGCC | 3943 | GGCGGCUGGCCGGGCGGGG |
| siRNA 1497 | 1497 | CCCGCCCGGCCAGCCGCCC | 3944 | GGGCGGCUGGCCGGGCGGG |
| siRNA 1498 | 1498 | CCGCCCGGCCAGCCGCCCC | 3945 | GGGGCGGCUGGCCGGGCGG |
| siRNA 1499 | 1499 | CGCCCGGCCAGCCGCCCCG | 3946 | CGGGGCGGCUGGCCGGGCG |
| siRNA 1500 | 1500 | GCCCGGCCAGCCGCCCCGU | 3947 | ACGGGGCGGCUGGCCGGGC |
| siRNA 1501 | 1501 | CCCGGCCAGCCGCCCCGUC | 3948 | GACGGGGCGGCUGGCCGGG |
| siRNA 1502 | 1502 | CCGGCCAGCCGCCCCGUCC | 3949 | GGACGGGGCGGCUGGCCGG |
| siRNA 1503 | 1503 | CGGCCAGCCGCCCCGUCCG | 3950 | CGGACGGGGCGGCUGGCCG |
| siRNA 1504 | 1504 | GGCCAGCCGCCCCGUCCGG | 3951 | CCGGACGGGGCGGCUGGCC |
| siRNA 1505 | 1505 | GCCAGCCGCCCCGUCCGGG | 3952 | CCCGGACGGGGCGGCUGGC |
| siRNA 1506 | 1506 | CCAGCCGCCCCGUCCGGGA | 3953 | UCCCGGACGGGGCGGCUGG |
| siRNA 1507 | 1507 | CAGCCGCCCCGUCCGGGAG | 3954 | CUCCCGGACGGGGCGGCUG |
| siRNA 1508 | 1508 | AGCCGCCCCGUCCGGGAGG | 3955 | CCUCCCGGACGGGGCGGCU |
| siRNA 1509 | 1509 | GCCGCCCCGUCCGGGAGGU | 3956 | ACCUCCCGGACGGGGCGGC |
| siRNA 1510 | 1510 | CCGCCCCGUCCGGGAGGUG | 3957 | CACCUCCCGGACGGGGCGG |
| siRNA 1511 | 1511 | CGCCCCGUCCGGGAGGUGA | 3958 | UCACCUCCCGGACGGGGCG |
| siRNA 1512 | 1512 | GCCCCGUCCGGGAGGUGAG | 3959 | CUCACCUCCCGGACGGGGC |
| siRNA 1513 | 1513 | CCCCGUCCGGGAGGUGAGG | 3960 | CCUCACCUCCCGGACGGGG |
| siRNA 1514 | 1514 | CCCGUCCGGGAGGUGAGGG | 3961 | CCCUCACCUCCCGGACGGG |
| siRNA 1515 | 1515 | CCGUCCGGGAGGUGAGGGG | 3962 | CCCCUCACCUCCCGGACGG |
| siRNA 1516 | 1516 | CGUCCGGGAGGUGAGGGGC | 3963 | GCCCCUCACCUCCCGGACG |
| siRNA 1517 | 1517 | GUCCGGGAGGUGAGGGGCG | 3964 | CGCCCCUCACCUCCCGGAC |
| siRNA 1518 | 1518 | UCCGGGAGGUGAGGGGCGC | 3965 | GCGCCCCUCACCUCCCGGA |
| siRNA 1519 | 1519 | CCGGGAGGUGAGGGGCGCC | 3966 | GGCGCCCCUCACCUCCCGG |
| siRNA 1520 | 1520 | CGGGAGGUGAGGGGCGCCU | 3967 | AGGCGCCCCUCACCUCCCG |
| siRNA 1521 | 1521 | GGGAGGUGAGGGGCGCCUC | 3968 | GAGGCGCCCCUCACCUCCC |
| siRNA 1522 | 1522 | GGAGGUGAGGGGCGCCUCU | 3969 | AGAGGCGCCCCUCACCUCC |
| siRNA 1523 | 1523 | GAGGUGAGGGGCGCCUCUG | 3970 | CAGAGGCGCCCCUCACCUC |
| siRNA 1524 | 1524 | AGGUGAGGGGCGCCUCUGC | 3971 | GCAGAGGCGCCCCUCACCU |
| siRNA 1525 | 1525 | GGUGAGGGGCGCCUCUGCC | 3972 | GGCAGAGGCGCCCCUCACC |
| siRNA 1526 | 1526 | GUGAGGGGCGCCUCUGCCC | 3973 | GGGCAGAGGCGCCCCUCAC |
| siRNA 1527 | 1527 | UGAGGGGCGCCUCUGCCCA | 3974 | UGGGCAGAGGCGCCCCUCA |
| siRNA 1528 | 1528 | GAGGGGCGCCUCUGCCCAG | 3975 | CUGGGCAGAGGCGCCCCUC |
| siRNA 1529 | 1529 | AGGGGCGCCUCUGCCCAGC | 3976 | GCUGGGCAGAGGCGCCCCU |
| siRNA 1530 | 1530 | GGGGCGCCUCUGCCCAGCC | 3977 | GGCUGGGCAGAGGCGCCCC |
| siRNA 1531 | 1531 | GGGCGCCUCUGCCCAGCCG | 3978 | CGGCUGGGCAGAGGCGCCC |
| siRNA 1532 | 1532 | GGCGCCUCUGCCCAGCCGC | 3979 | GCGGCUGGGCAGAGGCGCC |
| siRNA 1533 | 1533 | GCGCCUCUGCCCAGCCGCC | 3980 | GGCGGCUGGGCAGAGGCGC |
| siRNA 1534 | 1534 | CGCCUCUGCCCAGCCGCCC | 3981 | GGGCGGCUGGGCAGAGGCG |
| siRNA 1535 | 1535 | GCCUCUGCCCAGCCGCCCC | 3982 | GGGGCGGCUGGGCAGAGGC |
| siRNA 1536 | 1536 | CCUCUGCCCAGCCGCCCCU | 3983 | AGGGGCGGCUGGGCAGAGG |
| siRNA 1537 | 1537 | CUCUGCCCAGCCGCCCCUA | 3984 | UAGGGGCGGCUGGGCAGAG |
| siRNA 1538 | 1538 | UCUGCCCAGCCGCCCCUAC | 3985 | GUAGGGGCGGCUGGGCAGA |
| siRNA 1539 | 1539 | CUGCCCAGCCGCCCCUACU | 3986 | AGUAGGGGCGGCUGGGCAG |
| siRNA 1540 | 1540 | UGCCCAGCCGCCCCUACUG | 3987 | CAGUAGGGGCGGCUGGGCA |
| siRNA 1541 | 1541 | GCCCAGCCGCCCCUACUGG | 3988 | CCAGUAGGGGCGGCUGGGC |
| siRNA 1542 | 1542 | CCCAGCCGCCCCUACUGGG | 3989 | CCCAGUAGGGGCGGCUGGG |
| siRNA 1543 | 1543 | CCAGCCGCCCCUACUGGGA | 3990 | UCCCAGUAGGGGCGGCUGG |
| siRNA 1544 | 1544 | CAGCCGCCCCUACUGGGAA | 3991 | UUCCCAGUAGGGGCGGCUG |
| siRNA 1545 | 1545 | AGCCGCCCCUACUGGGAAG | 3992 | CUUCCCAGUAGGGGCGGCU |
| siRNA 1546 | 1546 | GCCGCCCCUACUGGGAAGU | 3993 | ACUUCCCAGUAGGGGCGGC |
| siRNA 1547 | 1547 | CCGCCCCUACUGGGAAGUG | 3994 | CACUUCCCAGUAGGGGCGG |
| siRNA 1548 | 1548 | CGCCCCUACUGGGAAGUGA | 3995 | UCACUUCCCAGUAGGGGCG |
| siRNA 1549 | 1549 | GCCCCUACUGGGAAGUGAG | 3996 | CUCACUUCCCAGUAGGGGC |
| siRNA 1550 | 1550 | CCCCUACUGGGAAGUGAGG | 3997 | CCUCACUUCCCAGUAGGGG |
| siRNA 1551 | 1551 | CCCUACUGGGAAGUGAGGA | 3998 | UCCUCACUUCCCAGUAGGG |
| siRNA 1552 | 1552 | CCUACUGGGAAGUGAGGAG | 3999 | CUCCUCACUUCCCAGUAGG |
| siRNA 1553 | 1553 | CUACUGGGAAGUGAGGAGC | 4000 | GCUCCUCACUUCCCAGUAG |
| siRNA 1554 | 1554 | UACUGGGAAGUGAGGAGCC | 4001 | GGCUCCUCACUUCCCAGUA |
| siRNA 1555 | 1555 | ACUGGGAAGUGAGGAGCCC | 4002 | GGGCUCCUCACUUCCCAGU |
| siRNA 1556 | 1556 | CUGGGAAGUGAGGAGCCCC | 4003 | GGGGCUCCUCACUUCCCAG |
| siRNA 1557 | 1557 | UGGGAAGUGAGGAGCCCCU | 4004 | AGGGGCUCCUCACUUCCCA |
| siRNA 1558 | 1558 | GGGAAGUGAGGAGCCCCUC | 4005 | GAGGGGCUCCUCACUUCCC |
| siRNA 1559 | 1559 | GGAAGUGAGGAGCCCCUCU | 4006 | AGAGGGGCUCCUCACUUCC |
| siRNA 1560 | 1560 | GAAGUGAGGAGCCCCUCUA | 4007 | UAGAGGGGCUCCUCACUUC |
| siRNA 1561 | 1561 | AAGUGAGGAGCCCCUCUAC | 4008 | GUAGAGGGGCUCCUCACUU |
| siRNA 1562 | 1562 | AGUGAGGAGCCCCUCUACC | 4009 | GGUAGAGGGGCUCCUCACU |
| siRNA 1563 | 1563 | GUGAGGAGCCCCUCUACCC | 4010 | GGGUAGAGGGGCUCCUCAC |
| siRNA 1564 | 1564 | UGAGGAGCCCCUCUACCCG | 4011 | CGGGUAGAGGGGCUCCUCA |
| siRNA 1565 | 1565 | GAGGAGCCCCUCUACCCGG | 4012 | CCGGGUAGAGGGGCUCCUC |
| siRNA 1566 | 1566 | AGGAGCCCCUCUACCCGGC | 4013 | GCCGGGUAGAGGGGCUCCU |
| siRNA 1567 | 1567 | GGAGCCCCUCUACCCGGCC | 4014 | GGCCGGGUAGAGGGGCUCC |
| siRNA 1568 | 1568 | GAGCCCCUCUACCCGGCCA | 4015 | UGGCCGGGUAGAGGGGCUC |
| siRNA 1569 | 1569 | AGCCCCUCUACCCGGCCAG | 4016 | CUGGCCGGGUAGAGGGGCU |
| siRNA 1570 | 1570 | GCCCCUCUACCCGGCCAGC | 4017 | GCUGGCCGGGUAGAGGGGC |
| siRNA 1571 | 1571 | CCCCUCUACCCGGCCAGCC | 4018 | GGCUGGCCGGGUAGAGGGG |
| siRNA 1572 | 1572 | CCCUCUACCCGGCCAGCCG | 4019 | CGGCUGGCCGGGUAGAGGG |
| siRNA 1573 | 1573 | CCUCUACCCGGCCAGCCGC | 4020 | GCGGCUGGCCGGGUAGAGG |
| siRNA 1574 | 1574 | CUCUACCCGGCCAGCCGCU | 4021 | AGCGGCUGGCCGGGUAGAG |
| siRNA 1575 | 1575 | UCUACCCGGCCAGCCGCUC | 4022 | GAGCGGCUGGCCGGGUAGA |
| siRNA 1576 | 1576 | CUACCCGGCCAGCCGCUCC | 4023 | GGAGCGGCUGGCCGGGUAG |
| siRNA 1577 | 1577 | UACCCGGCCAGCCGCUCCG | 4024 | CGGAGCGGCUGGCCGGGUA |
| siRNA 1578 | 1578 | ACCCGGCCAGCCGCUCCGU | 4025 | ACGGAGCGGCUGGCCGGGU |
| siRNA 1579 | 1579 | CCCGGCCAGCCGCUCCGUC | 4026 | GACGGAGCGGCUGGCCGGG |
| siRNA 1580 | 1580 | CCGGCCAGCCGCUCCGUCC | 4027 | GGACGGAGCGGCUGGCCGG |
| siRNA 1581 | 1581 | CGGCCAGCCGCUCCGUCCG | 4028 | CGGACGGAGCGGCUGGCCG |
| siRNA 1582 | 1582 | GGCCAGCCGCUCCGUCCGG | 4029 | CCGGACGGAGCGGCUGGCC |
| siRNA 1583 | 1583 | GCCAGCCGCUCCGUCCGGG | 4030 | CCCGGACGGAGCGGCUGGC |
| siRNA 1584 | 1584 | CCAGCCGCUCCGUCCGGGA | 4031 | UCCCGGACGGAGCGGCUGG |
| siRNA 1585 | 1585 | CAGCCGCUCCGUCCGGGAG | 4032 | CUCCCGGACGGAGCGGCUG |
| siRNA 1586 | 1586 | AGCCGCUCCGUCCGGGAGG | 4033 | CCUCCCGGACGGAGCGGCU |
| siRNA 1587 | 1587 | GCCGCUCCGUCCGGGAGGG | 4034 | CCCUCCCGGACGGAGCGGC |
| siRNA 1588 | 1588 | CCGCUCCGUCCGGGAGGGA | 4035 | UCCCUCCCGGACGGAGCGG |
| siRNA 1589 | 1589 | CGCUCCGUCCGGGAGGGAG | 4036 | CUCCCUCCCGGACGGAGCG |
| siRNA 1590 | 1590 | GCUCCGUCCGGGAGGGAGG | 4037 | CCUCCCUCCCGGACGGAGC |
| siRNA 1591 | 1591 | CUCCGUCCGGGAGGGAGGU | 4038 | ACCUCCCUCCCGGACGGAG |
| siRNA 1592 | 1592 | UCCGUCCGGGAGGGAGGUG | 4039 | CACCUCCCUCCCGGACGGA |
| siRNA 1593 | 1593 | CCGUCCGGGAGGGAGGUGG | 4040 | CCACCUCCCUCCCGGACGG |
| siRNA 1594 | 1594 | CGUCCGGGAGGGAGGUGGG | 4041 | CCCACCUCCCUCCCGGACG |
| siRNA 1595 | 1595 | GUCCGGGAGGGAGGUGGGG | 4042 | CCCCACCUCCCUCCCGGAC |
| siRNA 1596 | 1596 | UCCGGGAGGGAGGUGGGGG | 4043 | CCCCCACCUCCCUCCCGGA |
| siRNA 1597 | 1597 | CCGGGAGGGAGGUGGGGGG | 4044 | CCCCCCACCUCCCUCCCGG |
| siRNA 1598 | 1598 | CGGGAGGGAGGUGGGGGGG | 4045 | CCCCCCCACCUCCCUCCCG |
| siRNA 1599 | 1599 | GGGAGGGAGGUGGGGGGGU | 4046 | ACCCCCCCACCUCCCUCCC |
| siRNA 1600 | 1600 | GGAGGGAGGUGGGGGGGUC | 4047 | GACCCCCCCACCUCCCUCC |
| siRNA 1601 | 1601 | GAGGGAGGUGGGGGGGUCA | 4048 | UGACCCCCCCACCUCCCUC |
| siRNA 1602 | 1602 | AGGGAGGUGGGGGGGUCAG | 4049 | CUGACCCCCCCACCUCCCU |
| siRNA 1603 | 1603 | GGGAGGUGGGGGGGUCAGA | 4050 | UCUGACCCCCCCACCUCCC |
| siRNA 1604 | 1604 | GGAGGUGGGGGGGUCAGAC | 4051 | GUCUGACCCCCCCACCUCC |
| siRNA 1605 | 1605 | GAGGUGGGGGGGUCAGACC | 4052 | GGUCUGACCCCCCCACCUC |
| siRNA 1606 | 1606 | AGGUGGGGGGGUCAGACCC | 4053 | GGGUCUGACCCCCCCACCU |
| siRNA 1607 | 1607 | GGUGGGGGGGUCAGACCCC | 4054 | GGGGUCUGACCCCCCCACC |
| siRNA 1608 | 1608 | GUGGGGGGGUCAGACCCCG | 4055 | CGGGGUCUGACCCCCCCAC |
| siRNA 1609 | 1609 | UGGGGGGGUCAGACCCCGC | 4056 | GCGGGGUCUGACCCCCCCA |
| siRNA 1610 | 1610 | GGGGGGGUCAGACCCCGCC | 4057 | GGCGGGGUCUGACCCCCCC |
| siRNA 1611 | 1611 | GGGGGGUCAGACCCCGCCC | 4058 | GGGCGGGGUCUGACCCCCC |
| siRNA 1612 | 1612 | GGGGGUCAGACCCCGCCCG | 4059 | CGGGCGGGGUCUGACCCCC |
| siRNA 1613 | 1613 | GGGGUCAGACCCCGCCCGG | 4060 | CCGGGCGGGGUCUGACCCC |
| siRNA 1614 | 1614 | GGGUCAGACCCCGCCCGGC | 4061 | GCCGGGCGGGGUCUGACCC |
| siRNA 1615 | 1615 | GGUCAGACCCCGCCCGGCC | 4062 | GGCCGGGCGGGGUCUGACC |
| siRNA 1616 | 1616 | GUCAGACCCCGCCCGGCCA | 4063 | UGGCCGGGCGGGGUCUGAC |
| siRNA 1617 | 1617 | UCAGACCCCGCCCGGCCAG | 4064 | CUGGCCGGGCGGGGUCUGA |
| siRNA 1618 | 1618 | CAGACCCCGCCCGGCCAGC | 4065 | GCUGGCCGGGCGGGGUCUG |
| siRNA 1619 | 1619 | AGACCCCGCCCGGCCAGCC | 4066 | GGCUGGCCGGGCGGGGUCU |
| siRNA 1620 | 1620 | GACCCCGCCCGGCCAGCCG | 4067 | CGGCUGGCCGGGCGGGGUC |
| siRNA 1621 | 1621 | ACCCCGCCCGGCCAGCCGC | 4068 | GCGGCUGGCCGGGCGGGGU |
| siRNA 1622 | 1622 | CCCCGCCCGGCCAGCCGCC | 4069 | GGCGGCUGGCCGGGCGGGG |
| siRNA 1623 | 1623 | CCCGCCCGGCCAGCCGCCC | 4070 | GGGCGGCUGGCCGGGCGGG |
| siRNA 1624 | 1624 | CCGCCCGGCCAGCCGCCCC | 4071 | GGGGCGGCUGGCCGGGCGG |
| siRNA 1625 | 1625 | CGCCCGGCCAGCCGCCCCG | 4072 | CGGGGCGGCUGGCCGGGCG |
| siRNA 1626 | 1626 | GCCCGGCCAGCCGCCCCGU | 4073 | ACGGGGCGGCUGGCCGGGC |
| siRNA 1627 | 1627 | CCCGGCCAGCCGCCCCGUC | 4074 | GACGGGGCGGCUGGCCGGG |
| siRNA 1628 | 1628 | CCGGCCAGCCGCCCCGUCC | 4075 | GGACGGGGCGGCUGGCCGG |
| siRNA 1629 | 1629 | CGGCCAGCCGCCCCGUCCG | 4076 | CGGACGGGGCGGCUGGCCG |
| siRNA 1630 | 1630 | GGCCAGCCGCCCCGUCCGG | 4077 | CCGGACGGGGCGGCUGGCC |
| siRNA 1631 | 1631 | GCCAGCCGCCCCGUCCGGG | 4078 | CCCGGACGGGGCGGCUGGC |
| siRNA 1632 | 1632 | CCAGCCGCCCCGUCCGGGA | 4079 | UCCCGGACGGGGCGGCUGG |
| siRNA 1633 | 1633 | CAGCCGCCCCGUCCGGGAG | 4080 | CUCCCGGACGGGGCGGCUG |
| siRNA 1634 | 1634 | AGCCGCCCCGUCCGGGAGG | 4081 | CCUCCCGGACGGGGCGGCU |
| siRNA 1635 | 1635 | GCCGCCCCGUCCGGGAGGG | 4082 | CCCUCCCGGACGGGGCGGC |
| siRNA 1636 | 1636 | CCGCCCCGUCCGGGAGGGA | 4083 | UCCCUCCCGGACGGGGCGG |
| siRNA 1637 | 1637 | CGCCCCGUCCGGGAGGGAG | 4084 | CUCCCUCCCGGACGGGGCG |
| siRNA 1638 | 1638 | GCCCCGUCCGGGAGGGAGG | 4085 | CCUCCCUCCCGGACGGGGC |
| siRNA 1639 | 1639 | CCCCGUCCGGGAGGGAGGU | 4086 | ACCUCCCUCCCGGACGGGG |
| siRNA 1640 | 1640 | CCCGUCCGGGAGGGAGGUG | 4087 | CACCUCCCUCCCGGACGGG |
| siRNA 1641 | 1641 | CCGUCCGGGAGGGAGGUGG | 4088 | CCACCUCCCUCCCGGACGG |
| siRNA 1642 | 1642 | CGUCCGGGAGGGAGGUGGG | 4089 | CCCACCUCCCUCCCGGACG |
| siRNA 1643 | 1643 | GUCCGGGAGGGAGGUGGGG | 4090 | CCCCACCUCCCUCCCGGAC |
| siRNA 1644 | 1644 | UCCGGGAGGGAGGUGGGGG | 4091 | CCCCCACCUCCCUCCCGGA |
| siRNA 1645 | 1645 | CCGGGAGGGAGGUGGGGGG | 4092 | CCCCCCACCUCCCUCCCGG |
| siRNA 1646 | 1646 | CGGGAGGGAGGUGGGGGGU | 4093 | ACCCCCCACCUCCCUCCCG |
| siRNA 1647 | 1647 | GGGAGGGAGGUGGGGGGUU | 4094 | AACCCCCCACCUCCCUCCC |
| siRNA 1648 | 1648 | GGAGGGAGGUGGGGGGUUC | 4095 | GAACCCCCCACCUCCCUCC |
| siRNA 1649 | 1649 | GAGGGAGGUGGGGGGUUCA | 4096 | UGAACCCCCCACCUCCCUC |
| siRNA 1650 | 1650 | AGGGAGGUGGGGGGUUCAG | 4097 | CUGAACCCCCCACCUCCCU |
| siRNA 1651 | 1651 | GGGAGGUGGGGGGUUCAGC | 4098 | GCUGAACCCCCCACCUCCC |
| siRNA 1652 | 1652 | GGAGGUGGGGGGUUCAGCC | 4099 | GGCUGAACCCCCCACCUCC |
| siRNA 1653 | 1653 | GAGGUGGGGGGUUCAGCCC | 4100 | GGGCUGAACCCCCCACCUC |
| siRNA 1654 | 1654 | AGGUGGGGGGUUCAGCCCC | 4101 | GGGGCUGAACCCCCCACCU |
| siRNA 1655 | 1655 | GGUGGGGGGUUCAGCCCCC | 4102 | GGGGGCUGAACCCCCCACC |
| siRNA 1656 | 1656 | GUGGGGGGUUCAGCCCCCC | 4103 | GGGGGGCUGAACCCCCCAC |
| siRNA 1657 | 1657 | UGGGGGGUUCAGCCCCCCA | 4104 | UGGGGGGCUGAACCCCCCA |
| siRNA 1658 | 1658 | GGGGGGUUCAGCCCCCCAC | 4105 | GUGGGGGGCUGAACCCCCC |
| siRNA 1659 | 1659 | GGGGGUUCAGCCCCCCACC | 4106 | GGUGGGGGGCUGAACCCCC |
| siRNA 1660 | 1660 | GGGGUUCAGCCCCCCACCC | 4107 | GGGUGGGGGGCUGAACCCC |
| siRNA 1661 | 1661 | GGGUUCAGCCCCCCACCCG | 4108 | CGGGUGGGGGGCUGAACCC |
| siRNA 1662 | 1662 | GGUUCAGCCCCCCACCCGG | 4109 | CCGGGUGGGGGGCUGAACC |
| siRNA 1663 | 1663 | GUUCAGCCCCCCACCCGGC | 4110 | GCCGGGUGGGGGGCUGAAC |
| siRNA 1664 | 1664 | UUCAGCCCCCCACCCGGCC | 4111 | GGCCGGGUGGGGGGCUGAA |
| siRNA 1665 | 1665 | UCAGCCCCCCACCCGGCCA | 4112 | UGGCCGGGUGGGGGGCUGA |
| siRNA 1666 | 1666 | CAGCCCCCCACCCGGCCAG | 4113 | CUGGCCGGGUGGGGGGCUG |
| siRNA 1667 | 1667 | AGCCCCCCACCCGGCCAGC | 4114 | GCUGGCCGGGUGGGGGGCU |
| siRNA 1668 | 1668 | GCCCCCCACCCGGCCAGCC | 4115 | GGCUGGCCGGGUGGGGGGC |
| siRNA 1669 | 1669 | CCCCCCACCCGGCCAGCCA | 4116 | UGGCUGGCCGGGUGGGGGG |
| siRNA 1670 | 1670 | CCCCCACCCGGCCAGCCAC | 4117 | GUGGCUGGCCGGGUGGGGG |
| siRNA 1671 | 1671 | CCCCACCCGGCCAGCCACC | 4118 | GGUGGCUGGCCGGGUGGGG |
| siRNA 1672 | 1672 | CCCACCCGGCCAGCCACCA | 4119 | UGGUGGCUGGCCGGGUGGG |
| siRNA 1673 | 1673 | CCACCCGGCCAGCCACCAC | 4120 | GUGGUGGCUGGCCGGGUGG |
| siRNA 1674 | 1674 | CACCCGGCCAGCCACCACG | 4121 | CGUGGUGGCUGGCCGGGUG |
| siRNA 1675 | 1675 | ACCCGGCCAGCCACCACGU | 4122 | ACGUGGUGGCUGGCCGGGU |
| siRNA 1676 | 1676 | CCCGGCCAGCCACCACGUC | 4123 | GACGUGGUGGCUGGCCGGG |
| siRNA 1677 | 1677 | CCGGCCAGCCACCACGUCU | 4124 | AGACGUGGUGGCUGGCCGG |
| siRNA 1678 | 1678 | CGGCCAGCCACCACGUCUG | 4125 | CAGACGUGGUGGCUGGCCG |
| siRNA 1679 | 1679 | GGCCAGCCACCACGUCUGG | 4126 | CCAGACGUGGUGGCUGGCC |
| siRNA 1680 | 1680 | GCCAGCCACCACGUCUGGG | 4127 | CCCAGACGUGGUGGCUGGC |
| siRNA 1681 | 1681 | CCAGCCACCACGUCUGGGA | 4128 | UCCCAGACGUGGUGGCUGG |
| siRNA 1682 | 1682 | CAGCCACCACGUCUGGGAG | 4129 | CUCCCAGACGUGGUGGCUG |
| siRNA 1683 | 1683 | AGCCACCACGUCUGGGAGG | 4130 | CCUCCCAGACGUGGUGGCU |
| siRNA 1684 | 1684 | GCCACCACGUCUGGGAGGG | 4131 | CCCUCCCAGACGUGGUGGC |
| siRNA 1685 | 1685 | CCACCACGUCUGGGAGGGA | 4132 | UCCCUCCCAGACGUGGUGG |
| siRNA 1686 | 1686 | CACCACGUCUGGGAGGGAG | 4133 | CUCCCUCCCAGACGUGGUG |
| siRNA 1687 | 1687 | ACCACGUCUGGGAGGGAGG | 4134 | CCUCCCUCCCAGACGUGGU |
| siRNA 1688 | 1688 | CCACGUCUGGGAGGGAGGU | 4135 | ACCUCCCUCCCAGACGUGG |
| siRNA 1689 | 1689 | CACGUCUGGGAGGGAGGUG | 4136 | CACCUCCCUCCCAGACGUG |
| siRNA 1690 | 1690 | ACGUCUGGGAGGGAGGUGG | 4137 | CCACCUCCCUCCCAGACGU |
| siRNA 1691 | 1691 | CGUCUGGGAGGGAGGUGGG | 4138 | CCCACCUCCCUCCCAGACG |
| siRNA 1692 | 1692 | GUCUGGGAGGGAGGUGGGG | 4139 | CCCCACCUCCCUCCCAGAC |
| siRNA 1693 | 1693 | UCUGGGAGGGAGGUGGGGG | 4140 | CCCCCACCUCCCUCCCAGA |
| siRNA 1694 | 1694 | CUGGGAGGGAGGUGGGGGG | 4141 | CCCCCCACCUCCCUCCCAG |
| siRNA 1695 | 1695 | UGGGAGGGAGGUGGGGGGG | 4142 | CCCCCCCACCUCCCUCCCA |
| siRNA 1696 | 1696 | GGGAGGGAGGUGGGGGGGU | 4143 | ACCCCCCCACCUCCCUCCC |
| siRNA 1697 | 1697 | GGAGGGAGGUGGGGGGGUC | 4144 | GACCCCCCCACCUCCCUCC |
| siRNA 1698 | 1698 | GAGGGAGGUGGGGGGGUCA | 4145 | UGACCCCCCCACCUCCCUC |
| siRNA 1699 | 1699 | AGGGAGGUGGGGGGGUCAG | 4146 | CUGACCCCCCCACCUCCCU |
| siRNA 1700 | 1700 | GGGAGGUGGGGGGGUCAGC | 4147 | GCUGACCCCCCCACCUCCC |
| siRNA 1701 | 1701 | GGAGGUGGGGGGGUCAGCC | 4148 | GGCUGACCCCCCCACCUCC |
| siRNA 1702 | 1702 | GAGGUGGGGGGGUCAGCCC | 4149 | GGGCUGACCCCCCCACCUC |
| siRNA 1703 | 1703 | AGGUGGGGGGGUCAGCCCU | 4150 | AGGGCUGACCCCCCCACCU |
| siRNA 1704 | 1704 | GGUGGGGGGGUCAGCCCUC | 4151 | GAGGGCUGACCCCCCCACC |
| siRNA 1705 | 1705 | GUGGGGGGGUCAGCCCUCU | 4152 | AGAGGGCUGACCCCCCCAC |
| siRNA 1706 | 1706 | UGGGGGGGUCAGCCCUCUG | 4153 | CAGAGGGCUGACCCCCCCA |
| siRNA 1707 | 1707 | GGGGGGGUCAGCCCUCUGC | 4154 | GCAGAGGGCUGACCCCCCC |
| siRNA 1708 | 1708 | GGGGGGUCAGCCCUCUGCC | 4155 | GGCAGAGGGCUGACCCCCC |
| siRNA 1709 | 1709 | GGGGGUCAGCCCUCUGCCC | 4156 | GGGCAGAGGGCUGACCCCC |
| siRNA 1710 | 1710 | GGGGUCAGCCCUCUGCCCG | 4157 | CGGGCAGAGGGCUGACCCC |
| siRNA 1711 | 1711 | GGGUCAGCCCUCUGCCCGG | 4158 | CCGGGCAGAGGGCUGACCC |
| siRNA 1712 | 1712 | GGUCAGCCCUCUGCCCGGC | 4159 | GCCGGGCAGAGGGCUGACC |
| siRNA 1713 | 1713 | GUCAGCCCUCUGCCCGGCC | 4160 | GGCCGGGCAGAGGGCUGAC |
| siRNA 1714 | 1714 | UCAGCCCUCUGCCCGGCCA | 4161 | UGGCCGGGCAGAGGGCUGA |
| siRNA 1715 | 1715 | CAGCCCUCUGCCCGGCCAG | 4162 | CUGGCCGGGCAGAGGGCUG |
| siRNA 1716 | 1716 | AGCCCUCUGCCCGGCCAGC | 4163 | GCUGGCCGGGCAGAGGGCU |
| siRNA 1717 | 1717 | GCCCUCUGCCCGGCCAGCC | 4164 | GGCUGGCCGGGCAGAGGGC |
| siRNA 1718 | 1718 | CCCUCUGCCCGGCCAGCCG | 4165 | CGGCUGGCCGGGCAGAGGG |
| siRNA 1719 | 1719 | CCUCUGCCCGGCCAGCCGC | 4166 | GCGGCUGGCCGGGCAGAGG |
| siRNA 1720 | 1720 | CUCUGCCCGGCCAGCCGCC | 4167 | GGCGGCUGGCCGGGCAGAG |
| siRNA 1721 | 1721 | UCUGCCCGGCCAGCCGCCC | 4168 | GGGCGGCUGGCCGGGCAGA |
| siRNA 1722 | 1722 | CUGCCCGGCCAGCCGCCCC | 4169 | GGGGCGGCUGGCCGGGCAG |
| siRNA 1723 | 1723 | UGCCCGGCCAGCCGCCCCG | 4170 | CGGGGCGGCUGGCCGGGCA |
| siRNA 1724 | 1724 | GCCCGGCCAGCCGCCCCGU | 4171 | ACGGGGCGGCUGGCCGGGC |
| siRNA 1725 | 1725 | CCCGGCCAGCCGCCCCGUC | 4172 | GACGGGGCGGCUGGCCGGG |
| siRNA 1726 | 1726 | CCGGCCAGCCGCCCCGUCC | 4173 | GGACGGGGCGGCUGGCCGG |
| siRNA 1727 | 1727 | CGGCCAGCCGCCCCGUCCG | 4174 | CGGACGGGGCGGCUGGCCG |
| siRNA 1728 | 1728 | GGCCAGCCGCCCCGUCCGG | 4175 | CCGGACGGGGCGGCUGGCC |
| siRNA 1729 | 1729 | GCCAGCCGCCCCGUCCGGG | 4176 | CCCGGACGGGGCGGCUGGC |
| siRNA 1730 | 1730 | CCAGCCGCCCCGUCCGGGA | 4177 | UCCCGGACGGGGCGGCUGG |
| siRNA 1731 | 1731 | CAGCCGCCCCGUCCGGGAG | 4178 | CUCCCGGACGGGGCGGCUG |
| siRNA 1732 | 1732 | AGCCGCCCCGUCCGGGAGG | 4179 | CCUCCCGGACGGGGCGGCU |
| siRNA 1733 | 1733 | GCCGCCCCGUCCGGGAGGG | 4180 | CCCUCCCGGACGGGGCGGC |
| siRNA 1734 | 1734 | CCGCCCCGUCCGGGAGGGA | 4181 | UCCCUCCCGGACGGGGCGG |
| siRNA 1735 | 1735 | CGCCCCGUCCGGGAGGGAG | 4182 | CUCCCUCCCGGACGGGGCG |
| siRNA 1736 | 1736 | GCCCCGUCCGGGAGGGAGG | 4183 | CCUCCCUCCCGGACGGGGC |
| siRNA 1737 | 1737 | CCCCGUCCGGGAGGGAGGU | 4184 | ACCUCCCUCCCGGACGGGG |
| siRNA 1738 | 1738 | CCCGUCCGGGAGGGAGGUG | 4185 | CACCUCCCUCCCGGACGGG |
| siRNA 1739 | 1739 | CCGUCCGGGAGGGAGGUGG | 4186 | CCACCUCCCUCCCGGACGG |
| siRNA 1740 | 1740 | CGUCCGGGAGGGAGGUGGG | 4187 | CCCACCUCCCUCCCGGACG |
| siRNA 1741 | 1741 | GUCCGGGAGGGAGGUGGGG | 4188 | CCCCACCUCCCUCCCGGAC |
| siRNA 1742 | 1742 | UCCGGGAGGGAGGUGGGGG | 4189 | CCCCCACCUCCCUCCCGGA |
| siRNA 1743 | 1743 | CCGGGAGGGAGGUGGGGGG | 4190 | CCCCCCACCUCCCUCCCGG |
| siRNA 1744 | 1744 | CGGGAGGGAGGUGGGGGGU | 4191 | ACCCCCCACCUCCCUCCCG |
| siRNA 1745 | 1745 | GGGAGGGAGGUGGGGGGUU | 4192 | AACCCCCCACCUCCCUCCC |
| siRNA 1746 | 1746 | GGAGGGAGGUGGGGGGUUC | 4193 | GAACCCCCCACCUCCCUCC |
| siRNA 1747 | 1747 | GAGGGAGGUGGGGGGUUCA | 4194 | UGAACCCCCCACCUCCCUC |
| siRNA 1748 | 1748 | AGGGAGGUGGGGGGUUCAG | 4195 | CUGAACCCCCCACCUCCCU |
| siRNA 1749 | 1749 | GGGAGGUGGGGGGUUCAGC | 4196 | GCUGAACCCCCCACCUCCC |
| siRNA 1750 | 1750 | GGAGGUGGGGGGUUCAGCC | 4197 | GGCUGAACCCCCCACCUCC |
| siRNA 1751 | 1751 | GAGGUGGGGGGUUCAGCCC | 4198 | GGGCUGAACCCCCCACCUC |
| siRNA 1752 | 1752 | AGGUGGGGGGUUCAGCCCC | 4199 | GGGGCUGAACCCCCCACCU |
| siRNA 1753 | 1753 | GGUGGGGGGUUCAGCCCCC | 4200 | GGGGGCUGAACCCCCCACC |
| siRNA 1754 | 1754 | GUGGGGGGUUCAGCCCCCC | 4201 | GGGGGGCUGAACCCCCCAC |
| siRNA 1755 | 1755 | UGGGGGGUUCAGCCCCCCA | 4202 | UGGGGGGCUGAACCCCCCA |
| siRNA 1756 | 1756 | GGGGGGUUCAGCCCCCCAC | 4203 | GUGGGGGGCUGAACCCCCC |
| siRNA 1757 | 1757 | GGGGGUUCAGCCCCCCACC | 4204 | GGUGGGGGGCUGAACCCCC |
| siRNA 1758 | 1758 | GGGGUUCAGCCCCCCACCC | 4205 | GGGUGGGGGGCUGAACCCC |
| siRNA 1759 | 1759 | GGGUUCAGCCCCCCACCCG | 4206 | CGGGUGGGGGGCUGAACCC |
| siRNA 1760 | 1760 | GGUUCAGCCCCCCACCCGG | 4207 | CCGGGUGGGGGGCUGAACC |
| siRNA 1761 | 1761 | GUUCAGCCCCCCACCCGGC | 4208 | GCCGGGUGGGGGGCUGAAC |
| siRNA 1762 | 1762 | UUCAGCCCCCCACCCGGCC | 4209 | GGCCGGGUGGGGGGCUGAA |
| siRNA 1763 | 1763 | UCAGCCCCCCACCCGGCCA | 4210 | UGGCCGGGUGGGGGGCUGA |
| siRNA 1764 | 1764 | CAGCCCCCCACCCGGCCAG | 4211 | CUGGCCGGGUGGGGGGCUG |
| siRNA 1765 | 1765 | AGCCCCCCACCCGGCCAGC | 4212 | GCUGGCCGGGUGGGGGGCU |
| siRNA 1766 | 1766 | GCCCCCCACCCGGCCAGCC | 4213 | GGCUGGCCGGGUGGGGGGC |
| siRNA 1767 | 1767 | CCCCCCACCCGGCCAGCCG | 4214 | CGGCUGGCCGGGUGGGGGG |
| siRNA 1768 | 1768 | CCCCCACCCGGCCAGCCGC | 4215 | GCGGCUGGCCGGGUGGGGG |
| siRNA 1769 | 1769 | CCCCACCCGGCCAGCCGCC | 4216 | GGCGGCUGGCCGGGUGGGG |
| siRNA 1770 | 1770 | CCCACCCGGCCAGCCGCCC | 4217 | GGGCGGCUGGCCGGGUGGG |
| siRNA 1771 | 1771 | CCACCCGGCCAGCCGCCCC | 4218 | GGGGCGGCUGGCCGGGUGG |
| siRNA 1772 | 1772 | CACCCGGCCAGCCGCCCCG | 4219 | CGGGGCGGCUGGCCGGGUG |
| siRNA 1773 | 1773 | ACCCGGCCAGCCGCCCCGU | 4220 | ACGGGGCGGCUGGCCGGGU |
| siRNA 1774 | 1774 | CCCGGCCAGCCGCCCCGUC | 4221 | GACGGGGCGGCUGGCCGGG |
| siRNA 1775 | 1775 | CCGGCCAGCCGCCCCGUCC | 4222 | GGACGGGGCGGCUGGCCGG |
| siRNA 1776 | 1776 | CGGCCAGCCGCCCCGUCCG | 4223 | CGGACGGGGCGGCUGGCCG |
| siRNA 1777 | 1777 | GGCCAGCCGCCCCGUCCGG | 4224 | CCGGACGGGGCGGCUGGCC |
| siRNA 1778 | 1778 | GCCAGCCGCCCCGUCCGGG | 4225 | CCCGGACGGGGCGGCUGGC |
| siRNA 1779 | 1779 | CCAGCCGCCCCGUCCGGGA | 4226 | UCCCGGACGGGGCGGCUGG |
| siRNA 1780 | 1780 | CAGCCGCCCCGUCCGGGAG | 4227 | CUCCCGGACGGGGCGGCUG |
| siRNA 1781 | 1781 | AGCCGCCCCGUCCGGGAGG | 4228 | CCUCCCGGACGGGGCGGCU |
| siRNA 1782 | 1782 | GCCGCCCCGUCCGGGAGGG | 4229 | CCCUCCCGGACGGGGCGGC |
| siRNA 1783 | 1783 | CCGCCCCGUCCGGGAGGGA | 4230 | UCCCUCCCGGACGGGGCGG |
| siRNA 1784 | 1784 | CGCCCCGUCCGGGAGGGAG | 4231 | CUCCCUCCCGGACGGGGCG |
| siRNA 1785 | 1785 | GCCCCGUCCGGGAGGGAGG | 4232 | CCUCCCUCCCGGACGGGGC |
| siRNA 1786 | 1786 | CCCCGUCCGGGAGGGAGGU | 4233 | ACCUCCCUCCCGGACGGGG |
| siRNA 1787 | 1787 | CCCGUCCGGGAGGGAGGUG | 4234 | CACCUCCCUCCCGGACGGG |
| siRNA 1788 | 1788 | CCGUCCGGGAGGGAGGUGG | 4235 | CCACCUCCCUCCCGGACGG |
| siRNA 1789 | 1789 | CGUCCGGGAGGGAGGUGGA | 4236 | UCCACCUCCCUCCCGGACG |
| siRNA 1790 | 1790 | GUCCGGGAGGGAGGUGGAG | 4237 | CUCCACCUCCCUCCCGGAC |
| siRNA 1791 | 1791 | UCCGGGAGGGAGGUGGAGG | 4238 | CCUCCACCUCCCUCCCGGA |
| siRNA 1792 | 1792 | CCGGGAGGGAGGUGGAGGG | 4239 | CCCUCCACCUCCCUCCCGG |
| siRNA 1793 | 1793 | CGGGAGGGAGGUGGAGGGG | 4240 | CCCCUCCACCUCCCUCCCG |
| siRNA 1794 | 1794 | GGGAGGGAGGUGGAGGGGU | 4241 | ACCCCUCCACCUCCCUCCC |
| siRNA 1795 | 1795 | GGAGGGAGGUGGAGGGGUC | 4242 | GACCCCUCCACCUCCCUCC |
| siRNA 1796 | 1796 | GAGGGAGGUGGAGGGGUCA | 4243 | UGACCCCUCCACCUCCCUC |
| siRNA 1797 | 1797 | AGGGAGGUGGAGGGGUCAG | 4244 | CUGACCCCUCCACCUCCCU |
| siRNA 1798 | 1798 | GGGAGGUGGAGGGGUCAGC | 4245 | GCUGACCCCUCCACCUCCC |
| siRNA 1799 | 1799 | GGAGGUGGAGGGGUCAGCC | 4246 | GGCUGACCCCUCCACCUCC |
| siRNA 1800 | 1800 | GAGGUGGAGGGGUCAGCCC | 4247 | GGGCUGACCCCUCCACCUC |
| siRNA 1801 | 1801 | AGGUGGAGGGGUCAGCCCC | 4248 | GGGGCUGACCCCUCCACCU |
| siRNA 1802 | 1802 | GGUGGAGGGGUCAGCCCCC | 4249 | GGGGGCUGACCCCUCCACC |
| siRNA 1803 | 1803 | GUGGAGGGGUCAGCCCCCC | 4250 | GGGGGGCUGACCCCUCCAC |
| siRNA 1804 | 1804 | UGGAGGGGUCAGCCCCCCG | 4251 | CGGGGGGCUGACCCCUCCA |
| siRNA 1805 | 1805 | GGAGGGGUCAGCCCCCCGC | 4252 | GCGGGGGGCUGACCCCUCC |
| siRNA 1806 | 1806 | GAGGGGUCAGCCCCCCGCC | 4253 | GGCGGGGGGCUGACCCCUC |
| siRNA 1807 | 1807 | AGGGGUCAGCCCCCCGCCC | 4254 | GGGCGGGGGGCUGACCCCU |
| siRNA 1808 | 1808 | GGGGUCAGCCCCCCGCCCG | 4255 | CGGGCGGGGGGCUGACCCC |
| siRNA 1809 | 1809 | GGGUCAGCCCCCCGCCCGG | 4256 | CCGGGCGGGGGGCUGACCC |
| siRNA 1810 | 1810 | GGUCAGCCCCCCGCCCGGC | 4257 | GCCGGGCGGGGGGCUGACC |
| siRNA 1811 | 1811 | GUCAGCCCCCCGCCCGGCC | 4258 | GGCCGGGCGGGGGGCUGAC |
| siRNA 1812 | 1812 | UCAGCCCCCCGCCCGGCCA | 4259 | UGGCCGGGCGGGGGGCUGA |
| siRNA 1813 | 1813 | CAGCCCCCCGCCCGGCCAG | 4260 | CUGGCCGGGCGGGGGGCUG |
| siRNA 1814 | 1814 | AGCCCCCCGCCCGGCCAGC | 4261 | GCUGGCCGGGCGGGGGGCU |
| siRNA 1815 | 1815 | GCCCCCCGCCCGGCCAGCC | 4262 | GGCUGGCCGGGCGGGGGGC |
| siRNA 1816 | 1816 | CCCCCCGCCCGGCCAGCCG | 4263 | CGGCUGGCCGGGCGGGGGG |
| siRNA 1817 | 1817 | CCCCCGCCCGGCCAGCCGC | 4264 | GCGGCUGGCCGGGCGGGGG |
| siRNA 1818 | 1818 | CCCCGCCCGGCCAGCCGCC | 4265 | GGCGGCUGGCCGGGCGGGG |
| siRNA 1819 | 1819 | CCCGCCCGGCCAGCCGCCC | 4266 | GGGCGGCUGGCCGGGCGGG |
| siRNA 1820 | 1820 | CCGCCCGGCCAGCCGCCCC | 4267 | GGGGCGGCUGGCCGGGCGG |
| siRNA 1821 | 1821 | CGCCCGGCCAGCCGCCCCG | 4268 | CGGGGCGGCUGGCCGGGCG |
| siRNA 1822 | 1822 | GCCCGGCCAGCCGCCCCGU | 4269 | ACGGGGCGGCUGGCCGGGC |
| siRNA 1823 | 1823 | CCCGGCCAGCCGCCCCGUC | 4270 | GACGGGGCGGCUGGCCGGG |
| siRNA 1824 | 1824 | CCGGCCAGCCGCCCCGUCC | 4271 | GGACGGGGCGGCUGGCCGG |
| siRNA 1825 | 1825 | CGGCCAGCCGCCCCGUCCG | 4272 | CGGACGGGGCGGCUGGCCG |
| siRNA 1826 | 1826 | GGCCAGCCGCCCCGUCCGG | 4273 | CCGGACGGGGCGGCUGGCC |
| siRNA 1827 | 1827 | GCCAGCCGCCCCGUCCGGG | 4274 | CCCGGACGGGGCGGCUGGC |
| siRNA 1828 | 1828 | CCAGCCGCCCCGUCCGGGA | 4275 | UCCCGGACGGGGCGGCUGG |
| siRNA 1829 | 1829 | CAGCCGCCCCGUCCGGGAG | 4276 | CUCCCGGACGGGGCGGCUG |
| siRNA 1830 | 1830 | AGCCGCCCCGUCCGGGAGG | 4277 | CCUCCCGGACGGGGCGGCU |
| siRNA 1831 | 1831 | GCCGCCCCGUCCGGGAGGU | 4278 | ACCUCCCGGACGGGGCGGC |
| siRNA 1832 | 1832 | CCGCCCCGUCCGGGAGGUG | 4279 | CACCUCCCGGACGGGGCGG |
| siRNA 1833 | 1833 | CGCCCCGUCCGGGAGGUGA | 4280 | UCACCUCCCGGACGGGGCG |
| siRNA 1834 | 1834 | GCCCCGUCCGGGAGGUGAG | 4281 | CUCACCUCCCGGACGGGGC |
| siRNA 1835 | 1835 | CCCCGUCCGGGAGGUGAGG | 4282 | CCUCACCUCCCGGACGGGG |
| siRNA 1836 | 1836 | CCCGUCCGGGAGGUGAGGG | 4283 | CCCUCACCUCCCGGACGGG |
| siRNA 1837 | 1837 | CCGUCCGGGAGGUGAGGGG | 4284 | CCCCUCACCUCCCGGACGG |
| siRNA 1838 | 1838 | CGUCCGGGAGGUGAGGGGU | 4285 | ACCCCUCACCUCCCGGACG |
| siRNA 1839 | 1839 | GUCCGGGAGGUGAGGGGUG | 4286 | CACCCCUCACCUCCCGGAC |
| siRNA 1840 | 1840 | UCCGGGAGGUGAGGGGUGC | 4287 | GCACCCCUCACCUCCCGGA |
| siRNA 1841 | 1841 | CCGGGAGGUGAGGGGUGCC | 4288 | GGCACCCCUCACCUCCCGG |
| siRNA 1842 | 1842 | CGGGAGGUGAGGGGUGCCU | 4289 | AGGCACCCCUCACCUCCCG |
| siRNA 1843 | 1843 | GGGAGGUGAGGGGUGCCUC | 4290 | GAGGCACCCCUCACCUCCC |
| siRNA 1844 | 1844 | GGAGGUGAGGGGUGCCUCU | 4291 | AGAGGCACCCCUCACCUCC |
| siRNA 1845 | 1845 | GAGGUGAGGGGUGCCUCUG | 4292 | CAGAGGCACCCCUCACCUC |
| siRNA 1846 | 1846 | AGGUGAGGGGUGCCUCUGC | 4293 | GCAGAGGCACCCCUCACCU |
| siRNA 1847 | 1847 | GGUGAGGGGUGCCUCUGCC | 4294 | GGCAGAGGCACCCCUCACC |
| siRNA 1848 | 1848 | GUGAGGGGUGCCUCUGCCC | 4295 | GGGCAGAGGCACCCCUCAC |
| siRNA 1849 | 1849 | UGAGGGGUGCCUCUGCCCA | 4296 | UGGGCAGAGGCACCCCUCA |
| siRNA 1850 | 1850 | GAGGGGUGCCUCUGCCCAG | 4297 | CUGGGCAGAGGCACCCCUC |
| siRNA 1851 | 1851 | AGGGGUGCCUCUGCCCAGC | 4298 | GCUGGGCAGAGGCACCCCU |
| siRNA 1852 | 1852 | GGGGUGCCUCUGCCCAGCC | 4299 | GGCUGGGCAGAGGCACCCC |
| siRNA 1853 | 1853 | GGGUGCCUCUGCCCAGCCG | 4300 | CGGCUGGGCAGAGGCACCC |
| siRNA 1854 | 1854 | GGUGCCUCUGCCCAGCCGC | 4301 | GCGGCUGGGCAGAGGCACC |
| siRNA 1855 | 1855 | GUGCCUCUGCCCAGCCGCC | 4302 | GGCGGCUGGGCAGAGGCAC |
| siRNA 1856 | 1856 | UGCCUCUGCCCAGCCGCCC | 4303 | GGGCGGCUGGGCAGAGGCA |
| siRNA 1857 | 1857 | GCCUCUGCCCAGCCGCCCC | 4304 | GGGGCGGCUGGGCAGAGGC |
| siRNA 1858 | 1858 | CCUCUGCCCAGCCGCCCCU | 4305 | AGGGGCGGCUGGGCAGAGG |
| siRNA 1859 | 1859 | CUCUGCCCAGCCGCCCCUA | 4306 | UAGGGGCGGCUGGGCAGAG |
| siRNA 1860 | 1860 | UCUGCCCAGCCGCCCCUAC | 4307 | GUAGGGGCGGCUGGGCAGA |
| siRNA 1861 | 1861 | CUGCCCAGCCGCCCCUACU | 4308 | AGUAGGGGCGGCUGGGCAG |
| siRNA 1862 | 1862 | UGCCCAGCCGCCCCUACUG | 4309 | CAGUAGGGGCGGCUGGGCA |
| siRNA 1863 | 1863 | GCCCAGCCGCCCCUACUGG | 4310 | CCAGUAGGGGCGGCUGGGC |
| siRNA 1864 | 1864 | CCCAGCCGCCCCUACUGGG | 4311 | CCCAGUAGGGGCGGCUGGG |
| siRNA 1865 | 1865 | CCAGCCGCCCCUACUGGGA | 4312 | UCCCAGUAGGGGCGGCUGG |
| siRNA 1866 | 1866 | CAGCCGCCCCUACUGGGAA | 4313 | UUCCCAGUAGGGGCGGCUG |
| siRNA 1867 | 1867 | AGCCGCCCCUACUGGGAAG | 4314 | CUUCCCAGUAGGGGCGGCU |
| siRNA 1868 | 1868 | GCCGCCCCUACUGGGAAGU | 4315 | ACUUCCCAGUAGGGGCGGC |
| siRNA 1869 | 1869 | CCGCCCCUACUGGGAAGUG | 4316 | CACUUCCCAGUAGGGGCGG |
| siRNA 1870 | 1870 | CGCCCCUACUGGGAAGUGA | 4317 | UCACUUCCCAGUAGGGGCG |
| siRNA 1871 | 1871 | GCCCCUACUGGGAAGUGAG | 4318 | CUCACUUCCCAGUAGGGGC |
| siRNA 1872 | 1872 | CCCCUACUGGGAAGUGAGG | 4319 | CCUCACUUCCCAGUAGGGG |
| siRNA 1873 | 1873 | CCCUACUGGGAAGUGAGGA | 4320 | UCCUCACUUCCCAGUAGGG |
| siRNA 1874 | 1874 | CCUACUGGGAAGUGAGGAG | 4321 | CUCCUCACUUCCCAGUAGG |
| siRNA 1875 | 1875 | CUACUGGGAAGUGAGGAGC | 4322 | GCUCCUCACUUCCCAGUAG |
| siRNA 1876 | 1876 | UACUGGGAAGUGAGGAGCC | 4323 | GGCUCCUCACUUCCCAGUA |
| siRNA 1877 | 1877 | ACUGGGAAGUGAGGAGCCC | 4324 | GGGCUCCUCACUUCCCAGU |
| siRNA 1878 | 1878 | CUGGGAAGUGAGGAGCCCC | 4325 | GGGGCUCCUCACUUCCCAG |
| siRNA 1879 | 1879 | UGGGAAGUGAGGAGCCCCU | 4326 | AGGGGCUCCUCACUUCCCA |
| siRNA 1880 | 1880 | GGGAAGUGAGGAGCCCCUC | 4327 | GAGGGGCUCCUCACUUCCC |
| siRNA 1881 | 1881 | GGAAGUGAGGAGCCCCUCU | 4328 | AGAGGGGCUCCUCACUUCC |
| siRNA 1882 | 1882 | GAAGUGAGGAGCCCCUCUG | 4329 | CAGAGGGGCUCCUCACUUC |
| siRNA 1883 | 1883 | AAGUGAGGAGCCCCUCUGC | 4330 | GCAGAGGGGCUCCUCACUU |
| siRNA 1884 | 1884 | AGUGAGGAGCCCCUCUGCC | 4331 | GGCAGAGGGGCUCCUCACU |
| siRNA 1885 | 1885 | GUGAGGAGCCCCUCUGCCC | 4332 | GGGCAGAGGGGCUCCUCAC |
| siRNA 1886 | 1886 | UGAGGAGCCCCUCUGCCCG | 4333 | CGGGCAGAGGGGCUCCUCA |
| siRNA 1887 | 1887 | GAGGAGCCCCUCUGCCCGG | 4334 | CCGGGCAGAGGGGCUCCUC |
| siRNA 1888 | 1888 | AGGAGCCCCUCUGCCCGGC | 4335 | GCCGGGCAGAGGGGCUCCU |
| siRNA 1889 | 1889 | GGAGCCCCUCUGCCCGGCC | 4336 | GGCCGGGCAGAGGGGCUCC |
| siRNA 1890 | 1890 | GAGCCCCUCUGCCCGGCCA | 4337 | UGGCCGGGCAGAGGGGCUC |
| siRNA 1891 | 1891 | AGCCCCUCUGCCCGGCCAC | 4338 | GUGGCCGGGCAGAGGGGCU |
| siRNA 1892 | 1892 | GCCCCUCUGCCCGGCCACC | 4339 | GGUGGCCGGGCAGAGGGGC |
| siRNA 1893 | 1893 | CCCCUCUGCCCGGCCACCA | 4340 | UGGUGGCCGGGCAGAGGGG |
| siRNA 1894 | 1894 | CCCUCUGCCCGGCCACCAC | 4341 | GUGGUGGCCGGGCAGAGGG |
| siRNA 1895 | 1895 | CCUCUGCCCGGCCACCACC | 4342 | GGUGGUGGCCGGGCAGAGG |
| siRNA 1896 | 1896 | CUCUGCCCGGCCACCACCC | 4343 | GGGUGGUGGCCGGGCAGAG |
| siRNA 1897 | 1897 | UCUGCCCGGCCACCACCCC | 4344 | GGGGUGGUGGCCGGGCAGA |
| siRNA 1898 | 1898 | CUGCCCGGCCACCACCCCA | 4345 | UGGGGUGGUGGCCGGGCAG |
| siRNA 1899 | 1899 | UGCCCGGCCACCACCCCAU | 4346 | AUGGGGUGGUGGCCGGGCA |
| siRNA 1900 | 1900 | GCCCGGCCACCACCCCAUC | 4347 | GAUGGGGUGGUGGCCGGGC |
| siRNA 1901 | 1901 | CCCGGCCACCACCCCAUCU | 4348 | AGAUGGGGUGGUGGCCGGG |
| siRNA 1902 | 1902 | CCGGCCACCACCCCAUCUG | 4349 | CAGAUGGGGUGGUGGCCGG |
| siRNA 1903 | 1903 | CGGCCACCACCCCAUCUGG | 4350 | CCAGAUGGGGUGGUGGCCG |
| siRNA 1904 | 1904 | GGCCACCACCCCAUCUGGG | 4351 | CCCAGAUGGGGUGGUGGCC |
| siRNA 1905 | 1905 | GCCACCACCCCAUCUGGGA | 4352 | UCCCAGAUGGGGUGGUGGC |
| siRNA 1906 | 1906 | CCACCACCCCAUCUGGGAA | 4353 | UUCCCAGAUGGGGUGGUGG |
| siRNA 1907 | 1907 | CACCACCCCAUCUGGGAAG | 4354 | CUUCCCAGAUGGGGUGGUG |
| siRNA 1908 | 1908 | ACCACCCCAUCUGGGAAGU | 4355 | ACUUCCCAGAUGGGGUGGU |
| siRNA 1909 | 1909 | CCACCCCAUCUGGGAAGUG | 4356 | CACUUCCCAGAUGGGGUGG |
| siRNA 1910 | 1910 | CACCCCAUCUGGGAAGUGU | 4357 | ACACUUCCCAGAUGGGGUG |
| siRNA 1911 | 1911 | ACCCCAUCUGGGAAGUGUA | 4358 | UACACUUCCCAGAUGGGGU |
| siRNA 1912 | 1912 | CCCCAUCUGGGAAGUGUAC | 4359 | GUACACUUCCCAGAUGGGG |
| siRNA 1913 | 1913 | CCCAUCUGGGAAGUGUACC | 4360 | GGUACACUUCCCAGAUGGG |
| siRNA 1914 | 1914 | CCAUCUGGGAAGUGUACCC | 4361 | GGGUACACUUCCCAGAUGG |
| siRNA 1915 | 1915 | CAUCUGGGAAGUGUACCCA | 4362 | UGGGUACACUUCCCAGAUG |
| siRNA 1916 | 1916 | AUCUGGGAAGUGUACCCAA | 4363 | UUGGGUACACUUCCCAGAU |
| siRNA 1917 | 1917 | UCUGGGAAGUGUACCCAAU | 4364 | AUUGGGUACACUUCCCAGA |
| siRNA 1918 | 1918 | CUGGGAAGUGUACCCAAUA | 4365 | UAUUGGGUACACUUCCCAG |
| siRNA 1919 | 1919 | UGGGAAGUGUACCCAAUAG | 4366 | CUAUUGGGUACACUUCCCA |
| siRNA 1920 | 1920 | GGGAAGUGUACCCAAUAGC | 4367 | GCUAUUGGGUACACUUCCC |
| siRNA 1921 | 1921 | GGAAGUGUACCCAAUAGCU | 4368 | AGCUAUUGGGUACACUUCC |
| siRNA 1922 | 1922 | GAAGUGUACCCAAUAGCUC | 4369 | GAGCUAUUGGGUACACUUC |
| siRNA 1923 | 1923 | AAGUGUACCCAAUAGCUCA | 4370 | UGAGCUAUUGGGUACACUU |
| siRNA 1924 | 1924 | AGUGUACCCAAUAGCUCAU | 4371 | AUGAGCUAUUGGGUACACU |
| siRNA 1925 | 1925 | GUGUACCCAAUAGCUCAUU | 4372 | AAUGAGCUAUUGGGUACAC |
| siRNA 1926 | 1926 | UGUACCCAAUAGCUCAUUG | 4373 | CAAUGAGCUAUUGGGUACA |
| siRNA 1927 | 1927 | GUACCCAAUAGCUCAUUGA | 4374 | UCAAUGAGCUAUUGGGUAC |
| siRNA 1928 | 1928 | UACCCAAUAGCUCAUUGAG | 4375 | CUCAAUGAGCUAUUGGGUA |
| siRNA 1929 | 1929 | ACCCAAUAGCUCAUUGAGA | 4376 | UCUCAAUGAGCUAUUGGGU |
| siRNA 1930 | 1930 | CCCAAUAGCUCAUUGAGAA | 4377 | UUCUCAAUGAGCUAUUGGG |
| siRNA 1931 | 1931 | CCAAUAGCUCAUUGAGAAC | 4378 | GUUCUCAAUGAGCUAUUGG |
| siRNA 1932 | 1932 | CAAUAGCUCAUUGAGAACG | 4379 | CGUUCUCAAUGAGCUAUUG |
| siRNA 1933 | 1933 | AAUAGCUCAUUGAGAACGG | 4380 | CCGUUCUCAAUGAGCUAUU |
| siRNA 1934 | 1934 | AUAGCUCAUUGAGAACGGG | 4381 | CCCGUUCUCAAUGAGCUAU |
| siRNA 1935 | 1935 | UAGCUCAUUGAGAACGGGC | 4382 | GCCCGUUCUCAAUGAGCUA |
| siRNA 1936 | 1936 | AGCUCAUUGAGAACGGGCC | 4383 | GGCCCGUUCUCAAUGAGCU |
| siRNA 1937 | 1937 | GCUCAUUGAGAACGGGCCA | 4384 | UGGCCCGUUCUCAAUGAGC |
| siRNA 1938 | 1938 | CUCAUUGAGAACGGGCCAU | 4385 | AUGGCCCGUUCUCAAUGAG |
| siRNA 1939 | 1939 | UCAUUGAGAACGGGCCAUG | 4386 | CAUGGCCCGUUCUCAAUGA |
| siRNA 1940 | 1940 | CAUUGAGAACGGGCCAUGA | 4387 | UCAUGGCCCGUUCUCAAUG |
| siRNA 1941 | 1941 | AUUGAGAACGGGCCAUGAG | 4388 | CUCAUGGCCCGUUCUCAAU |
| siRNA 1942 | 1942 | UUGAGAACGGGCCAUGAGG | 4389 | CCUCAUGGCCCGUUCUCAA |
| siRNA 1943 | 1943 | UGAGAACGGGCCAUGAGGA | 4390 | UCCUCAUGGCCCGUUCUCA |
| siRNA 1944 | 1944 | GAGAACGGGCCAUGAGGAC | 4391 | GUCCUCAUGGCCCGUUCUC |
| siRNA 1945 | 1945 | AGAACGGGCCAUGAGGACA | 4392 | UGUCCUCAUGGCCCGUUCU |
| siRNA 1946 | 1946 | GAACGGGCCAUGAGGACAA | 4393 | UUGUCCUCAUGGCCCGUUC |
| siRNA 1947 | 1947 | AACGGGCCAUGAGGACAAU | 4394 | AUUGUCCUCAUGGCCCGUU |
| siRNA 1948 | 1948 | ACGGGCCAUGAGGACAAUG | 4395 | CAUUGUCCUCAUGGCCCGU |
| siRNA 1949 | 1949 | CGGGCCAUGAGGACAAUGG | 4396 | CCAUUGUCCUCAUGGCCCG |
| siRNA 1950 | 1950 | GGGCCAUGAGGACAAUGGC | 4397 | GCCAUUGUCCUCAUGGCCC |
| siRNA 1951 | 1951 | GGCCAUGAGGACAAUGGCG | 4398 | CGCCAUUGUCCUCAUGGCC |
| siRNA 1952 | 1952 | GCCAUGAGGACAAUGGCGG | 4399 | CCGCCAUUGUCCUCAUGGC |
| siRNA 1953 | 1953 | CCAUGAGGACAAUGGCGGU | 4400 | ACCGCCAUUGUCCUCAUGG |
| siRNA 1954 | 1954 | CAUGAGGACAAUGGCGGUU | 4401 | AACCGCCAUUGUCCUCAUG |
| siRNA 1955 | 1955 | AUGAGGACAAUGGCGGUUU | 4402 | AAACCGCCAUUGUCCUCAU |
| siRNA 1956 | 1956 | UGAGGACAAUGGCGGUUUU | 4403 | AAAACCGCCAUUGUCCUCA |
| siRNA 1957 | 1957 | GAGGACAAUGGCGGUUUUG | 4404 | CAAAACCGCCAUUGUCCUC |
| siRNA 1958 | 1958 | AGGACAAUGGCGGUUUUGU | 4405 | ACAAAACCGCCAUUGUCCU |
| siRNA 1959 | 1959 | GGACAAUGGCGGUUUUGUG | 4406 | CACAAAACCGCCAUUGUCC |
| siRNA 1960 | 1960 | GACAAUGGCGGUUUUGUGG | 4407 | CCACAAAACCGCCAUUGUC |
| siRNA 1961 | 1961 | ACAAUGGCGGUUUUGUGGA | 4408 | UCCACAAAACCGCCAUUGU |
| siRNA 1962 | 1962 | CAAUGGCGGUUUUGUGGAA | 4409 | UUCCACAAAACCGCCAUUG |
| siRNA 1963 | 1963 | AAUGGCGGUUUUGUGGAAU | 4410 | AUUCCACAAAACCGCCAUU |
| siRNA 1964 | 1964 | AUGGCGGUUUUGUGGAAUA | 4411 | UAUUCCACAAAACCGCCAU |
| siRNA 1965 | 1965 | UGGCGGUUUUGUGGAAUAG | 4412 | CUAUUCCACAAAACCGCCA |
| siRNA 1966 | 1966 | GGCGGUUUUGUGGAAUAGA | 4413 | UCUAUUCCACAAAACCGCC |
| siRNA 1967 | 1967 | GCGGUUUUGUGGAAUAGAA | 4414 | UUCUAUUCCACAAAACCGC |
| siRNA 1968 | 1968 | CGGUUUUGUGGAAUAGAAA | 4415 | UUUCUAUUCCACAAAACCG |
| siRNA 1969 | 1969 | GGUUUUGUGGAAUAGAAAG | 4416 | CUUUCUAUUCCACAAAACC |
| siRNA 1970 | 1970 | GUUUUGUGGAAUAGAAAGG | 4417 | CCUUUCUAUUCCACAAAAC |
| siRNA 1971 | 1971 | UUUUGUGGAAUAGAAAGGG | 4418 | CCCUUUCUAUUCCACAAAA |
| siRNA 1972 | 1972 | UUUGUGGAAUAGAAAGGGG | 4419 | CCCCUUUCUAUUCCACAAA |
| siRNA 1973 | 1973 | UUGUGGAAUAGAAAGGGGG | 4420 | CCCCCUUUCUAUUCCACAA |
| siRNA 1974 | 1974 | UGUGGAAUAGAAAGGGGGG | 4421 | CCCCCCUUUCUAUUCCACA |
| siRNA 1975 | 1975 | GUGGAAUAGAAAGGGGGGA | 4422 | UCCCCCCUUUCUAUUCCAC |
| siRNA 1976 | 1976 | UGGAAUAGAAAGGGGGGAA | 4423 | UUCCCCCCUUUCUAUUCCA |
| siRNA 1977 | 1977 | GGAAUAGAAAGGGGGGAAA | 4424 | UUUCCCCCCUUUCUAUUCC |
| siRNA 1978 | 1978 | GAAUAGAAAGGGGGGAAAG | 4425 | CUUUCCCCCCUUUCUAUUC |
| siRNA 1979 | 1979 | AAUAGAAAGGGGGGAAAGG | 4426 | CCUUUCCCCCCUUUCUAUU |
| siRNA 1980 | 1980 | AUAGAAAGGGGGGAAAGGU | 4427 | ACCUUUCCCCCCUUUCUAU |
| siRNA 1981 | 1981 | UAGAAAGGGGGGAAAGGUG | 4428 | CACCUUUCCCCCCUUUCUA |
| siRNA 1982 | 1982 | AGAAAGGGGGGAAAGGUGG | 4429 | CCACCUUUCCCCCCUUUCU |
| siRNA 1983 | 1983 | GAAAGGGGGGAAAGGUGGG | 4430 | CCCACCUUUCCCCCCUUUC |
| siRNA 1984 | 1984 | AAAGGGGGGAAAGGUGGGG | 4431 | CCCCACCUUUCCCCCCUUU |
| siRNA 1985 | 1985 | AAGGGGGGAAAGGUGGGGA | 4432 | UCCCCACCUUUCCCCCCUU |
| siRNA 1986 | 1986 | AGGGGGGAAAGGUGGGGAA | 4433 | UUCCCCACCUUUCCCCCCU |
| siRNA 1987 | 1987 | GGGGGGAAAGGUGGGGAAA | 4434 | UUUCCCCACCUUUCCCCCC |
| siRNA 1988 | 1988 | GGGGGAAAGGUGGGGAAAA | 4435 | UUUUCCCCACCUUUCCCCC |
| siRNA 1989 | 1989 | GGGGAAAGGUGGGGAAAAG | 4436 | CUUUUCCCCACCUUUCCCC |
| siRNA 1990 | 1990 | GGGAAAGGUGGGGAAAAGA | 4437 | UCUUUUCCCCACCUUUCCC |
| siRNA 1991 | 1991 | GGAAAGGUGGGGAAAAGAU | 4438 | AUCUUUUCCCCACCUUUCC |
| siRNA 1992 | 1992 | GAAAGGUGGGGAAAAGAUU | 4439 | AAUCUUUUCCCCACCUUUC |
| siRNA 1993 | 1993 | AAAGGUGGGGAAAAGAUUG | 4440 | CAAUCUUUUCCCCACCUUU |
| siRNA 1994 | 1994 | AAGGUGGGGAAAAGAUUGA | 4441 | UCAAUCUUUUCCCCACCUU |
| siRNA 1995 | 1995 | AGGUGGGGAAAAGAUUGAG | 4442 | CUCAAUCUUUUCCCCACCU |
| siRNA 1996 | 1996 | GGUGGGGAAAAGAUUGAGA | 4443 | UCUCAAUCUUUUCCCCACC |
| siRNA 1997 | 1997 | GUGGGGAAAAGAUUGAGAA | 4444 | UUCUCAAUCUUUUCCCCAC |
| siRNA 1998 | 1998 | UGGGGAAAAGAUUGAGAAA | 4445 | UUUCUCAAUCUUUUCCCCA |
| siRNA 1999 | 1999 | GGGGAAAAGAUUGAGAAAU | 4446 | AUUUCUCAAUCUUUUCCCC |
| siRNA 2000 | 2000 | GGGAAAAGAUUGAGAAAUC | 4447 | GAUUUCUCAAUCUUUUCCC |
| siRNA 2001 | 2001 | GGAAAAGAUUGAGAAAUCG | 4448 | CGAUUUCUCAAUCUUUUCC |
| siRNA 2002 | 2002 | GAAAAGAUUGAGAAAUCGG | 4449 | CCGAUUUCUCAAUCUUUUC |
| siRNA 2003 | 2003 | AAAAGAUUGAGAAAUCGGA | 4450 | UCCGAUUUCUCAAUCUUUU |
| siRNA 2004 | 2004 | AAAGAUUGAGAAAUCGGAU | 4451 | AUCCGAUUUCUCAAUCUUU |
| siRNA 2005 | 2005 | AAGAUUGAGAAAUCGGAUG | 4452 | CAUCCGAUUUCUCAAUCUU |
| siRNA 2006 | 2006 | AGAUUGAGAAAUCGGAUGG | 4453 | CCAUCCGAUUUCUCAAUCU |
| siRNA 2007 | 2007 | GAUUGAGAAAUCGGAUGGU | 4454 | ACCAUCCGAUUUCUCAAUC |
| siRNA 2008 | 2008 | AUUGAGAAAUCGGAUGGUU | 4455 | AACCAUCCGAUUUCUCAAU |
| siRNA 2009 | 2009 | UUGAGAAAUCGGAUGGUUG | 4456 | CAACCAUCCGAUUUCUCAA |
| siRNA 2010 | 2010 | UGAGAAAUCGGAUGGUUGC | 4457 | GCAACCAUCCGAUUUCUCA |
| siRNA 2011 | 2011 | GAGAAAUCGGAUGGUUGCC | 4458 | GGCAACCAUCCGAUUUCUC |
| siRNA 2012 | 2012 | AGAAAUCGGAUGGUUGCCU | 4459 | AGGCAACCAUCCGAUUUCU |
| siRNA 2013 | 2013 | GAAAUCGGAUGGUUGCCUU | 4460 | AAGGCAACCAUCCGAUUUC |
| siRNA 2014 | 2014 | AAAUCGGAUGGUUGCCUUG | 4461 | CAAGGCAACCAUCCGAUUU |
| siRNA 2015 | 2015 | AAUCGGAUGGUUGCCUUGU | 4462 | ACAAGGCAACCAUCCGAUU |
| siRNA 2016 | 2016 | AUCGGAUGGUUGCCUUGUC | 4463 | GACAAGGCAACCAUCCGAU |
| siRNA 2017 | 2017 | UCGGAUGGUUGCCUUGUCU | 4464 | AGACAAGGCAACCAUCCGA |
| siRNA 2018 | 2018 | CGGAUGGUUGCCUUGUCUG | 4465 | CAGACAAGGCAACCAUCCG |
| siRNA 2019 | 2019 | GGAUGGUUGCCUUGUCUGU | 4466 | ACAGACAAGGCAACCAUCC |
| siRNA 2020 | 2020 | GAUGGUUGCCUUGUCUGUG | 4467 | CACAGACAAGGCAACCAUC |
| siRNA 2021 | 2021 | AUGGUUGCCUUGUCUGUGU | 4468 | ACACAGACAAGGCAACCAU |
| siRNA 2022 | 2022 | UGGUUGCCUUGUCUGUGUG | 4469 | CACACAGACAAGGCAACCA |
| siRNA 2023 | 2023 | GGUUGCCUUGUCUGUGUGG | 4470 | CCACACAGACAAGGCAACC |
| siRNA 2024 | 2024 | GUUGCCUUGUCUGUGUGGA | 4471 | UCCACACAGACAAGGCAAC |
| siRNA 2025 | 2025 | UUGCCUUGUCUGUGUGGAA | 4472 | UUCCACACAGACAAGGCAA |
| siRNA 2026 | 2026 | UGCCUUGUCUGUGUGGAAA | 4473 | UUUCCACACAGACAAGGCA |
| siRNA 2027 | 2027 | GCCUUGUCUGUGUGGAAAG | 4474 | CUUUCCACACAGACAAGGC |
| siRNA 2028 | 2028 | CCUUGUCUGUGUGGAAAGA | 4475 | UCUUUCCACACAGACAAGG |
| siRNA 2029 | 2029 | CUUGUCUGUGUGGAAAGAA | 4476 | UUCUUUCCACACAGACAAG |
| siRNA 2030 | 2030 | UUGUCUGUGUGGAAAGAAG | 4477 | CUUCUUUCCACACAGACAA |
| siRNA 2031 | 2031 | UGUCUGUGUGGAAAGAAGU | 4478 | ACUUCUUUCCACACAGACA |
| siRNA 2032 | 2032 | GUCUGUGUGGAAAGAAGUA | 4479 | UACUUCUUUCCACACAGAC |
| siRNA 2033 | 2033 | UCUGUGUGGAAAGAAGUAG | 4480 | CUACUUCUUUCCACACAGA |
| siRNA 2034 | 2034 | CUGUGUGGAAAGAAGUAGA | 4481 | UCUACUUCUUUCCACACAG |
| siRNA 2035 | 2035 | UGUGUGGAAAGAAGUAGAC | 4482 | GUCUACUUCUUUCCACACA |
| siRNA 2036 | 2036 | GUGUGGAAAGAAGUAGACA | 4483 | UGUCUACUUCUUUCCACAC |
| siRNA 2037 | 2037 | UGUGGAAAGAAGUAGACAU | 4484 | AUGUCUACUUCUUUCCACA |
| siRNA 2038 | 2038 | GUGGAAAGAAGUAGACAUG | 4485 | CAUGUCUACUUCUUUCCAC |
| siRNA 2039 | 2039 | UGGAAAGAAGUAGACAUGG | 4486 | CCAUGUCUACUUCUUUCCA |
| siRNA 2040 | 2040 | GGAAAGAAGUAGACAUGGG | 4487 | CCCAUGUCUACUUCUUUCC |
| siRNA 2041 | 2041 | GAAAGAAGUAGACAUGGGA | 4488 | UCCCAUGUCUACUUCUUUC |
| siRNA 2042 | 2042 | AAAGAAGUAGACAUGGGAG | 4489 | CUCCCAUGUCUACUUCUUU |
| siRNA 2043 | 2043 | AAGAAGUAGACAUGGGAGA | 4490 | UCUCCCAUGUCUACUUCUU |
| siRNA 2044 | 2044 | AGAAGUAGACAUGGGAGAC | 4491 | GUCUCCCAUGUCUACUUCU |
| siRNA 2045 | 2045 | GAAGUAGACAUGGGAGACU | 4492 | AGUCUCCCAUGUCUACUUC |
| siRNA 2046 | 2046 | AAGUAGACAUGGGAGACUU | 4493 | AAGUCUCCCAUGUCUACUU |
| siRNA 2047 | 2047 | AGUAGACAUGGGAGACUUU | 4494 | AAAGUCUCCCAUGUCUACU |
| siRNA 2048 | 2048 | GUAGACAUGGGAGACUUUU | 4495 | AAAAGUCUCCCAUGUCUAC |
| siRNA 2049 | 2049 | UAGACAUGGGAGACUUUUC | 4496 | GAAAAGUCUCCCAUGUCUA |
| siRNA 2050 | 2050 | AGACAUGGGAGACUUUUCA | 4497 | UGAAAAGUCUCCCAUGUCU |
| siRNA 2051 | 2051 | GACAUGGGAGACUUUUCAU | 4498 | AUGAAAAGUCUCCCAUGUC |
| siRNA 2052 | 2052 | ACAUGGGAGACUUUUCAUU | 4499 | AAUGAAAAGUCUCCCAUGU |
| siRNA 2053 | 2053 | CAUGGGAGACUUUUCAUUU | 4500 | AAAUGAAAAGUCUCCCAUG |
| siRNA 2054 | 2054 | AUGGGAGACUUUUCAUUUU | 4501 | AAAAUGAAAAGUCUCCCAU |
| siRNA 2055 | 2055 | UGGGAGACUUUUCAUUUUG | 4502 | CAAAAUGAAAAGUCUCCCA |
| siRNA 2056 | 2056 | GGGAGACUUUUCAUUUUGU | 4503 | ACAAAAUGAAAAGUCUCCC |
| siRNA 2057 | 2057 | GGAGACUUUUCAUUUUGUU | 4504 | AACAAAAUGAAAAGUCUCC |
| siRNA 2058 | 2058 | GAGACUUUUCAUUUUGUUC | 4505 | GAACAAAAUGAAAAGUCUC |
| siRNA 2059 | 2059 | AGACUUUUCAUUUUGUUCU | 4506 | AGAACAAAAUGAAAAGUCU |
| siRNA 2060 | 2060 | GACUUUUCAUUUUGUUCUG | 4507 | CAGAACAAAAUGAAAAGUC |
| siRNA 2061 | 2061 | ACUUUUCAUUUUGUUCUGU | 4508 | ACAGAACAAAAUGAAAAGU |
| siRNA 2062 | 2062 | CUUUUCAUUUUGUUCUGUA | 4509 | UACAGAACAAAAUGAAAAG |
| siRNA 2063 | 2063 | UUUUCAUUUUGUUCUGUAC | 4510 | GUACAGAACAAAAUGAAAA |
| siRNA 2064 | 2064 | UUUCAUUUUGUUCUGUACU | 4511 | AGUACAGAACAAAAUGAAA |
| siRNA 2065 | 2065 | UUCAUUUUGUUCUGUACUA | 4512 | UAGUACAGAACAAAAUGAA |
| siRNA 2066 | 2066 | UCAUUUUGUUCUGUACUAA | 4513 | UUAGUACAGAACAAAAUGA |
| siRNA 2067 | 2067 | CAUUUUGUUCUGUACUAAG | 4514 | CUUAGUACAGAACAAAAUG |
| siRNA 2068 | 2068 | AUUUUGUUCUGUACUAAGA | 4515 | UCUUAGUACAGAACAAAAU |
| siRNA 2069 | 2069 | UUUUGUUCUGUACUAAGAA | 4516 | UUCUUAGUACAGAACAAAA |
| siRNA 2070 | 2070 | UUUGUUCUGUACUAAGAAA | 4517 | UUUCUUAGUACAGAACAAA |
| siRNA 2071 | 2071 | UUGUUCUGUACUAAGAAAA | 4518 | UUUUCUUAGUACAGAACAA |
| siRNA 2072 | 2072 | UGUUCUGUACUAAGAAAAA | 4519 | UUUUUCUUAGUACAGAACA |
| siRNA 2073 | 2073 | GUUCUGUACUAAGAAAAAU | 4520 | AUUUUUCUUAGUACAGAAC |
| siRNA 2074 | 2074 | UUCUGUACUAAGAAAAAUU | 4521 | AAUUUUUCUUAGUACAGAA |
| siRNA 2075 | 2075 | UCUGUACUAAGAAAAAUUC | 4522 | GAAUUUUUCUUAGUACAGA |
| siRNA 2076 | 2076 | CUGUACUAAGAAAAAUUCU | 4523 | AGAAUUUUUCUUAGUACAG |
| siRNA 2077 | 2077 | UGUACUAAGAAAAAUUCUU | 4524 | AAGAAUUUUUCUUAGUACA |
| siRNA 2078 | 2078 | GUACUAAGAAAAAUUCUUC | 4525 | GAAGAAUUUUUCUUAGUAC |
| siRNA 2079 | 2079 | UACUAAGAAAAAUUCUUCU | 4526 | AGAAGAAUUUUUCUUAGUA |
| siRNA 2080 | 2080 | ACUAAGAAAAAUUCUUCUG | 4527 | CAGAAGAAUUUUUCUUAGU |
| siRNA 2081 | 2081 | CUAAGAAAAAUUCUUCUGC | 4528 | GCAGAAGAAUUUUUCUUAG |
| siRNA 2082 | 2082 | UAAGAAAAAUUCUUCUGCC | 4529 | GGCAGAAGAAUUUUUCUUA |
| siRNA 2083 | 2083 | AAGAAAAAUUCUUCUGCCU | 4530 | AGGCAGAAGAAUUUUUCUU |
| siRNA 2084 | 2084 | AGAAAAAUUCUUCUGCCUU | 4531 | AAGGCAGAAGAAUUUUUCU |
| siRNA 2085 | 2085 | GAAAAAUUCUUCUGCCUUG | 4532 | CAAGGCAGAAGAAUUUUUC |
| siRNA 2086 | 2086 | AAAAAUUCUUCUGCCUUGG | 4533 | CCAAGGCAGAAGAAUUUUU |
| siRNA 2087 | 2087 | AAAAUUCUUCUGCCUUGGG | 4534 | CCCAAGGCAGAAGAAUUUU |
| siRNA 2088 | 2088 | AAAUUCUUCUGCCUUGGGA | 4535 | UCCCAAGGCAGAAGAAUUU |
| siRNA 2089 | 2089 | AAUUCUUCUGCCUUGGGAU | 4536 | AUCCCAAGGCAGAAGAAUU |
| siRNA 2090 | 2090 | AUUCUUCUGCCUUGGGAUC | 4537 | GAUCCCAAGGCAGAAGAAU |
| siRNA 2091 | 2091 | UUCUUCUGCCUUGGGAUCC | 4538 | GGAUCCCAAGGCAGAAGAA |
| siRNA 2092 | 2092 | UCUUCUGCCUUGGGAUCCU | 4539 | AGGAUCCCAAGGCAGAAGA |
| siRNA 2093 | 2093 | CUUCUGCCUUGGGAUCCUG | 4540 | CAGGAUCCCAAGGCAGAAG |
| siRNA 2094 | 2094 | UUCUGCCUUGGGAUCCUGU | 4541 | ACAGGAUCCCAAGGCAGAA |
| siRNA 2095 | 2095 | UCUGCCUUGGGAUCCUGUU | 4542 | AACAGGAUCCCAAGGCAGA |
| siRNA 2096 | 2096 | CUGCCUUGGGAUCCUGUUG | 4543 | CAACAGGAUCCCAAGGCAG |
| siRNA 2097 | 2097 | UGCCUUGGGAUCCUGUUGA | 4544 | UCAACAGGAUCCCAAGGCA |
| siRNA 2098 | 2098 | GCCUUGGGAUCCUGUUGAU | 4545 | AUCAACAGGAUCCCAAGGC |
| siRNA 2099 | 2099 | CCUUGGGAUCCUGUUGAUC | 4546 | GAUCAACAGGAUCCCAAGG |
| siRNA 2100 | 2100 | CUUGGGAUCCUGUUGAUCU | 4547 | AGAUCAACAGGAUCCCAAG |
| siRNA 2101 | 2101 | UUGGGAUCCUGUUGAUCUG | 4548 | CAGAUCAACAGGAUCCCAA |
| siRNA 2102 | 2102 | UGGGAUCCUGUUGAUCUGU | 4549 | ACAGAUCAACAGGAUCCCA |
| siRNA 2103 | 2103 | GGGAUCCUGUUGAUCUGUG | 4550 | CACAGAUCAACAGGAUCCC |
| siRNA 2104 | 2104 | GGAUCCUGUUGAUCUGUGA | 4551 | UCACAGAUCAACAGGAUCC |
| siRNA 2105 | 2105 | GAUCCUGUUGAUCUGUGAC | 4552 | GUCACAGAUCAACAGGAUC |
| siRNA 2106 | 2106 | AUCCUGUUGAUCUGUGACC | 4553 | GGUCACAGAUCAACAGGAU |
| siRNA 2107 | 2107 | UCCUGUUGAUCUGUGACCU | 4554 | AGGUCACAGAUCAACAGGA |
| siRNA 2108 | 2108 | CCUGUUGAUCUGUGACCUU | 4555 | AAGGUCACAGAUCAACAGG |
| siRNA 2109 | 2109 | CUGUUGAUCUGUGACCUUA | 4556 | UAAGGUCACAGAUCAACAG |
| siRNA 2110 | 2110 | UGUUGAUCUGUGACCUUAC | 4557 | GUAAGGUCACAGAUCAACA |
| siRNA 2111 | 2111 | GUUGAUCUGUGACCUUACC | 4558 | GGUAAGGUCACAGAUCAAC |
| siRNA 2112 | 2112 | UUGAUCUGUGACCUUACCC | 4559 | GGGUAAGGUCACAGAUCAA |
| siRNA 2113 | 2113 | UGAUCUGUGACCUUACCCC | 4560 | GGGGUAAGGUCACAGAUCA |
| siRNA 2114 | 2114 | GAUCUGUGACCUUACCCCC | 4561 | GGGGGUAAGGUCACAGAUC |
| siRNA 2115 | 2115 | AUCUGUGACCUUACCCCCA | 4562 | UGGGGGUAAGGUCACAGAU |
| siRNA 2116 | 2116 | UCUGUGACCUUACCCCCAA | 4563 | UUGGGGGUAAGGUCACAGA |
| siRNA 2117 | 2117 | CUGUGACCUUACCCCCAAC | 4564 | GUUGGGGGUAAGGUCACAG |
| siRNA 2118 | 2118 | UGUGACCUUACCCCCAACC | 4565 | GGUUGGGGGUAAGGUCACA |
| siRNA 2119 | 2119 | GUGACCUUACCCCCAACCC | 4566 | GGGUUGGGGGUAAGGUCAC |
| siRNA 2120 | 2120 | UGACCUUACCCCCAACCCU | 4567 | AGGGUUGGGGGUAAGGUCA |
| siRNA 2121 | 2121 | GACCUUACCCCCAACCCUG | 4568 | CAGGGUUGGGGGUAAGGUC |
| siRNA 2122 | 2122 | ACCUUACCCCCAACCCUGU | 4569 | ACAGGGUUGGGGGUAAGGU |
| siRNA 2123 | 2123 | CCUUACCCCCAACCCUGUG | 4570 | CACAGGGUUGGGGGUAAGG |
| siRNA 2124 | 2124 | CUUACCCCCAACCCUGUGC | 4571 | GCACAGGGUUGGGGGUAAG |
| siRNA 2125 | 2125 | UUACCCCCAACCCUGUGCU | 4572 | AGCACAGGGUUGGGGGUAA |
| siRNA 2126 | 2126 | UACCCCCAACCCUGUGCUC | 4573 | GAGCACAGGGUUGGGGGUA |
| siRNA 2127 | 2127 | ACCCCCAACCCUGUGCUCU | 4574 | AGAGCACAGGGUUGGGGGU |
| siRNA 2128 | 2128 | CCCCCAACCCUGUGCUCUC | 4575 | GAGAGCACAGGGUUGGGGG |
| siRNA 2129 | 2129 | CCCCAACCCUGUGCUCUCU | 4576 | AGAGAGCACAGGGUUGGGG |
| siRNA 2130 | 2130 | CCCAACCCUGUGCUCUCUG | 4577 | CAGAGAGCACAGGGUUGGG |
| siRNA 2131 | 2131 | CCAACCCUGUGCUCUCUGA | 4578 | UCAGAGAGCACAGGGUUGG |
| siRNA 2132 | 2132 | CAACCCUGUGCUCUCUGAA | 4579 | UUCAGAGAGCACAGGGUUG |
| siRNA 2133 | 2133 | AACCCUGUGCUCUCUGAAA | 4580 | UUUCAGAGAGCACAGGGUU |
| siRNA 2134 | 2134 | ACCCUGUGCUCUCUGAAAC | 4581 | GUUUCAGAGAGCACAGGGU |
| siRNA 2135 | 2135 | CCCUGUGCUCUCUGAAACA | 4582 | UGUUUCAGAGAGCACAGGG |
| siRNA 2136 | 2136 | CCUGUGCUCUCUGAAACAU | 4583 | AUGUUUCAGAGAGCACAGG |
| siRNA 2137 | 2137 | CUGUGCUCUCUGAAACAUG | 4584 | CAUGUUUCAGAGAGCACAG |
| siRNA 2138 | 2138 | UGUGCUCUCUGAAACAUGU | 4585 | ACAUGUUUCAGAGAGCACA |
| siRNA 2139 | 2139 | GUGCUCUCUGAAACAUGUG | 4586 | CACAUGUUUCAGAGAGCAC |
| siRNA 2140 | 2140 | UGCUCUCUGAAACAUGUGC | 4587 | GCACAUGUUUCAGAGAGCA |
| siRNA 2141 | 2141 | GCUCUCUGAAACAUGUGCU | 4588 | AGCACAUGUUUCAGAGAGC |
| siRNA 2142 | 2142 | CUCUCUGAAACAUGUGCUG | 4589 | CAGCACAUGUUUCAGAGAG |
| siRNA 2143 | 2143 | UCUCUGAAACAUGUGCUGU | 4590 | ACAGCACAUGUUUCAGAGA |
| siRNA 2144 | 2144 | CUCUGAAACAUGUGCUGUG | 4591 | CACAGCACAUGUUUCAGAG |
| siRNA 2145 | 2145 | UCUGAAACAUGUGCUGUGU | 4592 | ACACAGCACAUGUUUCAGA |
| siRNA 2146 | 2146 | CUGAAACAUGUGCUGUGUC | 4593 | GACACAGCACAUGUUUCAG |
| siRNA 2147 | 2147 | UGAAACAUGUGCUGUGUCC | 4594 | GGACACAGCACAUGUUUCA |
| siRNA 2148 | 2148 | GAAACAUGUGCUGUGUCCA | 4595 | UGGACACAGCACAUGUUUC |
| siRNA 2149 | 2149 | AAACAUGUGCUGUGUCCAC | 4596 | GUGGACACAGCACAUGUUU |
| siRNA 2150 | 2150 | AACAUGUGCUGUGUCCACU | 4597 | AGUGGACACAGCACAUGUU |
| siRNA 2151 | 2151 | ACAUGUGCUGUGUCCACUC | 4598 | GAGUGGACACAGCACAUGU |
| siRNA 2152 | 2152 | CAUGUGCUGUGUCCACUCA | 4599 | UGAGUGGACACAGCACAUG |
| siRNA 2153 | 2153 | AUGUGCUGUGUCCACUCAG | 4600 | CUGAGUGGACACAGCACAU |
| siRNA 2154 | 2154 | UGUGCUGUGUCCACUCAGG | 4601 | CCUGAGUGGACACAGCACA |
| siRNA 2155 | 2155 | GUGCUGUGUCCACUCAGGG | 4602 | CCCUGAGUGGACACAGCAC |
| siRNA 2156 | 2156 | UGCUGUGUCCACUCAGGGU | 4603 | ACCCUGAGUGGACACAGCA |
| siRNA 2157 | 2157 | GCUGUGUCCACUCAGGGUU | 4604 | AACCCUGAGUGGACACAGC |
| siRNA 2158 | 2158 | CUGUGUCCACUCAGGGUUA | 4605 | UAACCCUGAGUGGACACAG |
| siRNA 2159 | 2159 | UGUGUCCACUCAGGGUUAA | 4606 | UUAACCCUGAGUGGACACA |
| siRNA 2160 | 2160 | GUGUCCACUCAGGGUUAAA | 4607 | UUUAACCCUGAGUGGACAC |
| siRNA 2161 | 2161 | UGUCCACUCAGGGUUAAAU | 4608 | AUUUAACCCUGAGUGGACA |
| siRNA 2162 | 2162 | GUCCACUCAGGGUUAAAUG | 4609 | CAUUUAACCCUGAGUGGAC |
| siRNA 2163 | 2163 | UCCACUCAGGGUUAAAUGG | 4610 | CCAUUUAACCCUGAGUGGA |
| siRNA 2164 | 2164 | CCACUCAGGGUUAAAUGGA | 4611 | UCCAUUUAACCCUGAGUGG |
| siRNA 2165 | 2165 | CACUCAGGGUUAAAUGGAU | 4612 | AUCCAUUUAACCCUGAGUG |
| siRNA 2166 | 2166 | ACUCAGGGUUAAAUGGAUU | 4613 | AAUCCAUUUAACCCUGAGU |
| siRNA 2167 | 2167 | CUCAGGGUUAAAUGGAUUA | 4614 | UAAUCCAUUUAACCCUGAG |
| siRNA 2168 | 2168 | UCAGGGUUAAAUGGAUUAA | 4615 | UUAAUCCAUUUAACCCUGA |
| siRNA 2169 | 2169 | CAGGGUUAAAUGGAUUAAG | 4616 | CUUAAUCCAUUUAACCCUG |
| siRNA 2170 | 2170 | AGGGUUAAAUGGAUUAAGG | 4617 | CCUUAAUCCAUUUAACCCU |
| siRNA 2171 | 2171 | GGGUUAAAUGGAUUAAGGG | 4618 | CCCUUAAUCCAUUUAACCC |
| siRNA 2172 | 2172 | GGUUAAAUGGAUUAAGGGC | 4619 | GCCCUUAAUCCAUUUAACC |
| siRNA 2173 | 2173 | GUUAAAUGGAUUAAGGGCG | 4620 | CGCCCUUAAUCCAUUUAAC |
| siRNA 2174 | 2174 | UUAAAUGGAUUAAGGGCGG | 4621 | CCGCCCUUAAUCCAUUUAA |
| siRNA 2175 | 2175 | UAAAUGGAUUAAGGGCGGU | 4622 | ACCGCCCUUAAUCCAUUUA |
| siRNA 2176 | 2176 | AAAUGGAUUAAGGGCGGUG | 4623 | CACCGCCCUUAAUCCAUUU |
| siRNA 2177 | 2177 | AAUGGAUUAAGGGCGGUGC | 4624 | GCACCGCCCUUAAUCCAUU |
| siRNA 2178 | 2178 | AUGGAUUAAGGGCGGUGCA | 4625 | UGCACCGCCCUUAAUCCAU |
| siRNA 2179 | 2179 | UGGAUUAAGGGCGGUGCAA | 4626 | UUGCACCGCCCUUAAUCCA |
| siRNA 2180 | 2180 | GGAUUAAGGGCGGUGCAAG | 4627 | CUUGCACCGCCCUUAAUCC |
| siRNA 2181 | 2181 | GAUUAAGGGCGGUGCAAGG | 4628 | CCUUGCACCGCCCUUAAUC |
| siRNA 2182 | 2182 | AUUAAGGGCGGUGCAAGGU | 4629 | ACCUUGCACCGCCCUUAAU |
| siRNA 2183 | 2183 | UUAAGGGCGGUGCAAGGUG | 4630 | CACCUUGCACCGCCCUUAA |
| siRNA 2184 | 2184 | UAAGGGCGGUGCAAGGUGU | 4631 | ACACCUUGCACCGCCCUUA |
| siRNA 2185 | 2185 | AAGGGCGGUGCAAGGUGUG | 4632 | CACACCUUGCACCGCCCUU |
| siRNA 2186 | 2186 | AGGGCGGUGCAAGGUGUGC | 4633 | GCACACCUUGCACCGCCCU |
| siRNA 2187 | 2187 | GGGCGGUGCAAGGUGUGCU | 4634 | AGCACACCUUGCACCGCCC |
| siRNA 2188 | 2188 | GGCGGUGCAAGGUGUGCUU | 4635 | AAGCACACCUUGCACCGCC |
| siRNA 2189 | 2189 | GCGGUGCAAGGUGUGCUUU | 4636 | AAAGCACACCUUGCACCGC |
| siRNA 2190 | 2190 | CGGUGCAAGGUGUGCUUUG | 4637 | CAAAGCACACCUUGCACCG |
| siRNA 2191 | 2191 | GGUGCAAGGUGUGCUUUGU | 4638 | ACAAAGCACACCUUGCACC |
| siRNA 2192 | 2192 | GUGCAAGGUGUGCUUUGUU | 4639 | AACAAAGCACACCUUGCAC |
| siRNA 2193 | 2193 | UGCAAGGUGUGCUUUGUUA | 4640 | UAACAAAGCACACCUUGCA |
| siRNA 2194 | 2194 | GCAAGGUGUGCUUUGUUAA | 4641 | UUAACAAAGCACACCUUGC |
| siRNA 2195 | 2195 | CAAGGUGUGCUUUGUUAAA | 4642 | UUUAACAAAGCACACCUUG |
| siRNA 2196 | 2196 | AAGGUGUGCUUUGUUAAAC | 4643 | GUUUAACAAAGCACACCUU |
| siRNA 2197 | 2197 | AGGUGUGCUUUGUUAAACA | 4644 | UGUUUAACAAAGCACACCU |
| siRNA 2198 | 2198 | GGUGUGCUUUGUUAAACAG | 4645 | CUGUUUAACAAAGCACACC |
| siRNA 2199 | 2199 | GUGUGCUUUGUUAAACAGA | 4646 | UCUGUUUAACAAAGCACAC |
| siRNA 2200 | 2200 | UGUGCUUUGUUAAACAGAU | 4647 | AUCUGUUUAACAAAGCACA |
| siRNA 2201 | 2201 | GUGCUUUGUUAAACAGAUG | 4648 | CAUCUGUUUAACAAAGCAC |
| siRNA 2202 | 2202 | UGCUUUGUUAAACAGAUGC | 4649 | GCAUCUGUUUAACAAAGCA |
| siRNA 2203 | 2203 | GCUUUGUUAAACAGAUGCU | 4650 | AGCAUCUGUUUAACAAAGC |
| siRNA 2204 | 2204 | CUUUGUUAAACAGAUGCUU | 4651 | AAGCAUCUGUUUAACAAAG |
| siRNA 2205 | 2205 | UUUGUUAAACAGAUGCUUG | 4652 | CAAGCAUCUGUUUAACAAA |
| siRNA 2206 | 2206 | UUGUUAAACAGAUGCUUGA | 4653 | UCAAGCAUCUGUUUAACAA |
| siRNA 2207 | 2207 | UGUUAAACAGAUGCUUGAA | 4654 | UUCAAGCAUCUGUUUAACA |
| siRNA 2208 | 2208 | GUUAAACAGAUGCUUGAAG | 4655 | CUUCAAGCAUCUGUUUAAC |
| siRNA 2209 | 2209 | UUAAACAGAUGCUUGAAGG | 4656 | CCUUCAAGCAUCUGUUUAA |
| siRNA 2210 | 2210 | UAAACAGAUGCUUGAAGGC | 4657 | GCCUUCAAGCAUCUGUUUA |
| siRNA 2211 | 2211 | AAACAGAUGCUUGAAGGCA | 4658 | UGCCUUCAAGCAUCUGUUU |
| siRNA 2212 | 2212 | AACAGAUGCUUGAAGGCAG | 4659 | CUGCCUUCAAGCAUCUGUU |
| siRNA 2213 | 2213 | ACAGAUGCUUGAAGGCAGC | 4660 | GCUGCCUUCAAGCAUCUGU |
| siRNA 2214 | 2214 | CAGAUGCUUGAAGGCAGCA | 4661 | UGCUGCCUUCAAGCAUCUG |
| siRNA 2215 | 2215 | AGAUGCUUGAAGGCAGCAU | 4662 | AUGCUGCCUUCAAGCAUCU |
| siRNA 2216 | 2216 | GAUGCUUGAAGGCAGCAUG | 4663 | CAUGCUGCCUUCAAGCAUC |
| siRNA 2217 | 2217 | AUGCUUGAAGGCAGCAUGC | 4664 | GCAUGCUGCCUUCAAGCAU |
| siRNA 2218 | 2218 | UGCUUGAAGGCAGCAUGCU | 4665 | AGCAUGCUGCCUUCAAGCA |
| siRNA 2219 | 2219 | GCUUGAAGGCAGCAUGCUC | 4666 | GAGCAUGCUGCCUUCAAGC |
| siRNA 2220 | 2220 | CUUGAAGGCAGCAUGCUCG | 4667 | CGAGCAUGCUGCCUUCAAG |
| siRNA 2221 | 2221 | UUGAAGGCAGCAUGCUCGU | 4668 | ACGAGCAUGCUGCCUUCAA |
| siRNA 2222 | 2222 | UGAAGGCAGCAUGCUCGUU | 4669 | AACGAGCAUGCUGCCUUCA |
| siRNA 2223 | 2223 | GAAGGCAGCAUGCUCGUUA | 4670 | UAACGAGCAUGCUGCCUUC |
| siRNA 2224 | 2224 | AAGGCAGCAUGCUCGUUAA | 4671 | UUAACGAGCAUGCUGCCUU |
| siRNA 2225 | 2225 | AGGCAGCAUGCUCGUUAAG | 4672 | CUUAACGAGCAUGCUGCCU |
| siRNA 2226 | 2226 | GGCAGCAUGCUCGUUAAGA | 4673 | UCUUAACGAGCAUGCUGCC |
| siRNA 2227 | 2227 | GCAGCAUGCUCGUUAAGAG | 4674 | CUCUUAACGAGCAUGCUGC |
| siRNA 2228 | 2228 | CAGCAUGCUCGUUAAGAGU | 4675 | ACUCUUAACGAGCAUGCUG |
| siRNA 2229 | 2229 | AGCAUGCUCGUUAAGAGUC | 4676 | GACUCUUAACGAGCAUGCU |
| siRNA 2230 | 2230 | GCAUGCUCGUUAAGAGUCA | 4677 | UGACUCUUAACGAGCAUGC |
| siRNA 2231 | 2231 | CAUGCUCGUUAAGAGUCAU | 4678 | AUGACUCUUAACGAGCAUG |
| siRNA 2232 | 2232 | AUGCUCGUUAAGAGUCAUC | 4679 | GAUGACUCUUAACGAGCAU |
| siRNA 2233 | 2233 | UGCUCGUUAAGAGUCAUCA | 4680 | UGAUGACUCUUAACGAGCA |
| siRNA 2234 | 2234 | GCUCGUUAAGAGUCAUCAC | 4681 | GUGAUGACUCUUAACGAGC |
| siRNA 2235 | 2235 | CUCGUUAAGAGUCAUCACC | 4682 | GGUGAUGACUCUUAACGAG |
| siRNA 2236 | 2236 | UCGUUAAGAGUCAUCACCA | 4683 | UGGUGAUGACUCUUAACGA |
| siRNA 2237 | 2237 | CGUUAAGAGUCAUCACCAC | 4684 | GUGGUGAUGACUCUUAACG |
| siRNA 2238 | 2238 | GUUAAGAGUCAUCACCACU | 4685 | AGUGGUGAUGACUCUUAAC |
| siRNA 2239 | 2239 | UUAAGAGUCAUCACCACUC | 4686 | GAGUGGUGAUGACUCUUAA |
| siRNA 2240 | 2240 | UAAGAGUCAUCACCACUCC | 4687 | GGAGUGGUGAUGACUCUUA |
| siRNA 2241 | 2241 | AAGAGUCAUCACCACUCCC | 4688 | GGGAGUGGUGAUGACUCUU |
| siRNA 2242 | 2242 | AGAGUCAUCACCACUCCCU | 4689 | AGGGAGUGGUGAUGACUCU |
| siRNA 2243 | 2243 | GAGUCAUCACCACUCCCUA | 4690 | UAGGGAGUGGUGAUGACUC |
| siRNA 2244 | 2244 | AGUCAUCACCACUCCCUAA | 4691 | UUAGGGAGUGGUGAUGACU |
| siRNA 2245 | 2245 | GUCAUCACCACUCCCUAAU | 4692 | AUUAGGGAGUGGUGAUGAC |
| siRNA 2246 | 2246 | UCAUCACCACUCCCUAAUC | 4693 | GAUUAGGGAGUGGUGAUGA |
| siRNA 2247 | 2247 | CAUCACCACUCCCUAAUCU | 4694 | AGAUUAGGGAGUGGUGAUG |
| siRNA 2248 | 2248 | AUCACCACUCCCUAAUCUC | 4695 | GAGAUUAGGGAGUGGUGAU |
| siRNA 2249 | 2249 | UCACCACUCCCUAAUCUCA | 4696 | UGAGAUUAGGGAGUGGUGA |
| siRNA 2250 | 2250 | CACCACUCCCUAAUCUCAA | 4697 | UUGAGAUUAGGGAGUGGUG |
| siRNA 2251 | 2251 | ACCACUCCCUAAUCUCAAG | 4698 | CUUGAGAUUAGGGAGUGGU |
| siRNA 2252 | 2252 | CCACUCCCUAAUCUCAAGU | 4699 | ACUUGAGAUUAGGGAGUGG |
| siRNA 2253 | 2253 | CACUCCCUAAUCUCAAGUA | 4700 | UACUUGAGAUUAGGGAGUG |
| siRNA 2254 | 2254 | ACUCCCUAAUCUCAAGUAC | 4701 | GUACUUGAGAUUAGGGAGU |
| siRNA 2255 | 2255 | CUCCCUAAUCUCAAGUACC | 4702 | GGUACUUGAGAUUAGGGAG |
| siRNA 2256 | 2256 | UCCCUAAUCUCAAGUACCC | 4703 | GGGUACUUGAGAUUAGGGA |
| siRNA 2257 | 2257 | CCCUAAUCUCAAGUACCCA | 4704 | UGGGUACUUGAGAUUAGGG |
| siRNA 2258 | 2258 | CCUAAUCUCAAGUACCCAG | 4705 | CUGGGUACUUGAGAUUAGG |
| siRNA 2259 | 2259 | CUAAUCUCAAGUACCCAGG | 4706 | CCUGGGUACUUGAGAUUAG |
| siRNA 2260 | 2260 | UAAUCUCAAGUACCCAGGG | 4707 | CCCUGGGUACUUGAGAUUA |
| siRNA 2261 | 2261 | AAUCUCAAGUACCCAGGGA | 4708 | UCCCUGGGUACUUGAGAUU |
| siRNA 2262 | 2262 | AUCUCAAGUACCCAGGGAC | 4709 | GUCCCUGGGUACUUGAGAU |
| siRNA 2263 | 2263 | UCUCAAGUACCCAGGGACA | 4710 | UGUCCCUGGGUACUUGAGA |
| siRNA 2264 | 2264 | CUCAAGUACCCAGGGACAC | 4711 | GUGUCCCUGGGUACUUGAG |
| siRNA 2265 | 2265 | UCAAGUACCCAGGGACACA | 4712 | UGUGUCCCUGGGUACUUGA |
| siRNA 2266 | 2266 | CAAGUACCCAGGGACACAA | 4713 | UUGUGUCCCUGGGUACUUG |
| siRNA 2267 | 2267 | AAGUACCCAGGGACACAAA | 4714 | UUUGUGUCCCUGGGUACUU |
| siRNA 2268 | 2268 | AGUACCCAGGGACACAAAC | 4715 | GUUUGUGUCCCUGGGUACU |
| siRNA 2269 | 2269 | GUACCCAGGGACACAAACA | 4716 | UGUUUGUGUCCCUGGGUAC |
| siRNA 2270 | 2270 | UACCCAGGGACACAAACAC | 4717 | GUGUUUGUGUCCCUGGGUA |
| siRNA 2271 | 2271 | ACCCAGGGACACAAACACC | 4718 | GGUGUUUGUGUCCCUGGGU |
| siRNA 2272 | 2272 | CCCAGGGACACAAACACCU | 4719 | AGGUGUUUGUGUCCCUGGG |
| siRNA 2273 | 2273 | CCAGGGACACAAACACCUC | 4720 | GAGGUGUUUGUGUCCCUGG |
| siRNA 2274 | 2274 | CAGGGACACAAACACCUCG | 4721 | CGAGGUGUUUGUGUCCCUG |
| siRNA 2275 | 2275 | AGGGACACAAACACCUCGG | 4722 | CCGAGGUGUUUGUGUCCCU |
| siRNA 2276 | 2276 | GGGACACAAACACCUCGGA | 4723 | UCCGAGGUGUUUGUGUCCC |
| siRNA 2277 | 2277 | GGACACAAACACCUCGGAA | 4724 | UUCCGAGGUGUUUGUGUCC |
| siRNA 2278 | 2278 | GACACAAACACCUCGGAAG | 4725 | CUUCCGAGGUGUUUGUGUC |
| siRNA 2279 | 2279 | ACACAAACACCUCGGAAGG | 4726 | CCUUCCGAGGUGUUUGUGU |
| siRNA 2280 | 2280 | CACAAACACCUCGGAAGGC | 4727 | GCCUUCCGAGGUGUUUGUG |
| siRNA 2281 | 2281 | ACAAACACCUCGGAAGGCC | 4728 | GGCCUUCCGAGGUGUUUGU |
| siRNA 2282 | 2282 | CAAACACCUCGGAAGGCCG | 4729 | CGGCCUUCCGAGGUGUUUG |
| siRNA 2283 | 2283 | AAACACCUCGGAAGGCCGC | 4730 | GCGGCCUUCCGAGGUGUUU |
| siRNA 2284 | 2284 | AACACCUCGGAAGGCCGCA | 4731 | UGCGGCCUUCCGAGGUGUU |
| siRNA 2285 | 2285 | ACACCUCGGAAGGCCGCAG | 4732 | CUGCGGCCUUCCGAGGUGU |
| siRNA 2286 | 2286 | CACCUCGGAAGGCCGCAGG | 4733 | CCUGCGGCCUUCCGAGGUG |
| siRNA 2287 | 2287 | ACCUCGGAAGGCCGCAGGG | 4734 | CCCUGCGGCCUUCCGAGGU |
| siRNA 2288 | 2288 | CCUCGGAAGGCCGCAGGGU | 4735 | ACCCUGCGGCCUUCCGAGG |
| siRNA 2289 | 2289 | CUCGGAAGGCCGCAGGGUC | 4736 | GACCCUGCGGCCUUCCGAG |
| siRNA 2290 | 2290 | UCGGAAGGCCGCAGGGUCC | 4737 | GGACCCUGCGGCCUUCCGA |
| siRNA 2291 | 2291 | CGGAAGGCCGCAGGGUCCU | 4738 | AGGACCCUGCGGCCUUCCG |
| siRNA 2292 | 2292 | GGAAGGCCGCAGGGUCCUC | 4739 | GAGGACCCUGCGGCCUUCC |
| siRNA 2293 | 2293 | GAAGGCCGCAGGGUCCUCU | 4740 | AGAGGACCCUGCGGCCUUC |
| siRNA 2294 | 2294 | AAGGCCGCAGGGUCCUCUG | 4741 | CAGAGGACCCUGCGGCCUU |
| siRNA 2295 | 2295 | AGGCCGCAGGGUCCUCUGC | 4742 | GCAGAGGACCCUGCGGCCU |
| siRNA 2296 | 2296 | GGCCGCAGGGUCCUCUGCC | 4743 | GGCAGAGGACCCUGCGGCC |
| siRNA 2297 | 2297 | GCCGCAGGGUCCUCUGCCU | 4744 | AGGCAGAGGACCCUGCGGC |
| siRNA 2298 | 2298 | CCGCAGGGUCCUCUGCCUA | 4745 | UAGGCAGAGGACCCUGCGG |
| siRNA 2299 | 2299 | CGCAGGGUCCUCUGCCUAG | 4746 | CUAGGCAGAGGACCCUGCG |
| siRNA 2300 | 2300 | GCAGGGUCCUCUGCCUAGG | 4747 | CCUAGGCAGAGGACCCUGC |
| siRNA 2301 | 2301 | CAGGGUCCUCUGCCUAGGA | 4748 | UCCUAGGCAGAGGACCCUG |
| siRNA 2302 | 2302 | AGGGUCCUCUGCCUAGGAA | 4749 | UUCCUAGGCAGAGGACCCU |
| siRNA 2303 | 2303 | GGGUCCUCUGCCUAGGAAA | 4750 | UUUCCUAGGCAGAGGACCC |
| siRNA 2304 | 2304 | GGUCCUCUGCCUAGGAAAA | 4751 | UUUUCCUAGGCAGAGGACC |
| siRNA 2305 | 2305 | GUCCUCUGCCUAGGAAAAC | 4752 | GUUUUCCUAGGCAGAGGAC |
| siRNA 2306 | 2306 | UCCUCUGCCUAGGAAAACC | 4753 | GGUUUUCCUAGGCAGAGGA |
| siRNA 2307 | 2307 | CCUCUGCCUAGGAAAACCA | 4754 | UGGUUUUCCUAGGCAGAGG |
| siRNA 2308 | 2308 | CUCUGCCUAGGAAAACCAG | 4755 | CUGGUUUUCCUAGGCAGAG |
| siRNA 2309 | 2309 | UCUGCCUAGGAAAACCAGA | 4756 | UCUGGUUUUCCUAGGCAGA |
| siRNA 2310 | 2310 | CUGCCUAGGAAAACCAGAG | 4757 | CUCUGGUUUUCCUAGGCAG |
| siRNA 2311 | 2311 | UGCCUAGGAAAACCAGAGA | 4758 | UCUCUGGUUUUCCUAGGCA |
| siRNA 2312 | 2312 | GCCUAGGAAAACCAGAGAC | 4759 | GUCUCUGGUUUUCCUAGGC |
| siRNA 2313 | 2313 | CCUAGGAAAACCAGAGACC | 4760 | GGUCUCUGGUUUUCCUAGG |
| siRNA 2314 | 2314 | CUAGGAAAACCAGAGACCU | 4761 | AGGUCUCUGGUUUUCCUAG |
| siRNA 2315 | 2315 | UAGGAAAACCAGAGACCUU | 4762 | AAGGUCUCUGGUUUUCCUA |
| siRNA 2316 | 2316 | AGGAAAACCAGAGACCUUU | 4763 | AAAGGUCUCUGGUUUUCCU |
| siRNA 2317 | 2317 | GGAAAACCAGAGACCUUUG | 4764 | CAAAGGUCUCUGGUUUUCC |
| siRNA 2318 | 2318 | GAAAACCAGAGACCUUUGU | 4765 | ACAAAGGUCUCUGGUUUUC |
| siRNA 2319 | 2319 | AAAACCAGAGACCUUUGUU | 4766 | AACAAAGGUCUCUGGUUUU |
| siRNA 2320 | 2320 | AAACCAGAGACCUUUGUUC | 4767 | GAACAAAGGUCUCUGGUUU |
| siRNA 2321 | 2321 | AACCAGAGACCUUUGUUCA | 4768 | UGAACAAAGGUCUCUGGUU |
| siRNA 2322 | 2322 | ACCAGAGACCUUUGUUCAC | 4769 | GUGAACAAAGGUCUCUGGU |
| siRNA 2323 | 2323 | CCAGAGACCUUUGUUCACU | 4770 | AGUGAACAAAGGUCUCUGG |
| siRNA 2324 | 2324 | CAGAGACCUUUGUUCACUU | 4771 | AAGUGAACAAAGGUCUCUG |
| siRNA 2325 | 2325 | AGAGACCUUUGUUCACUUG | 4772 | CAAGUGAACAAAGGUCUCU |
| siRNA 2326 | 2326 | GAGACCUUUGUUCACUUGU | 4773 | ACAAGUGAACAAAGGUCUC |
| siRNA 2327 | 2327 | AGACCUUUGUUCACUUGUU | 4774 | AACAAGUGAACAAAGGUCU |
| siRNA 2328 | 2328 | GACCUUUGUUCACUUGUUU | 4775 | AAACAAGUGAACAAAGGUC |
| siRNA 2329 | 2329 | ACCUUUGUUCACUUGUUUA | 4776 | UAAACAAGUGAACAAAGGU |
| siRNA 2330 | 2330 | CCUUUGUUCACUUGUUUAU | 4777 | AUAAACAAGUGAACAAAGG |
| siRNA 2331 | 2331 | CUUUGUUCACUUGUUUAUC | 4778 | GAUAAACAAGUGAACAAAG |
| siRNA 2332 | 2332 | UUUGUUCACUUGUUUAUCU | 4779 | AGAUAAACAAGUGAACAAA |
| siRNA 2333 | 2333 | UUGUUCACUUGUUUAUCUG | 4780 | CAGAUAAACAAGUGAACAA |
| siRNA 2334 | 2334 | UGUUCACUUGUUUAUCUGC | 4781 | GCAGAUAAACAAGUGAACA |
| siRNA 2335 | 2335 | GUUCACUUGUUUAUCUGCU | 4782 | AGCAGAUAAACAAGUGAAC |
| siRNA 2336 | 2336 | UUCACUUGUUUAUCUGCUG | 4783 | CAGCAGAUAAACAAGUGAA |
| siRNA 2337 | 2337 | UCACUUGUUUAUCUGCUGA | 4784 | UCAGCAGAUAAACAAGUGA |
| siRNA 2338 | 2338 | CACUUGUUUAUCUGCUGAC | 4785 | GUCAGCAGAUAAACAAGUG |
| siRNA 2339 | 2339 | ACUUGUUUAUCUGCUGACC | 4786 | GGUCAGCAGAUAAACAAGU |
| siRNA 2340 | 2340 | CUUGUUUAUCUGCUGACCU | 4787 | AGGUCAGCAGAUAAACAAG |
| siRNA 2341 | 2341 | UUGUUUAUCUGCUGACCUU | 4788 | AAGGUCAGCAGAUAAACAA |
| siRNA 2342 | 2342 | UGUUUAUCUGCUGACCUUC | 4789 | GAAGGUCAGCAGAUAAACA |
| siRNA 2343 | 2343 | GUUUAUCUGCUGACCUUCC | 4790 | GGAAGGUCAGCAGAUAAAC |
| siRNA 2344 | 2344 | UUUAUCUGCUGACCUUCCC | 4791 | GGGAAGGUCAGCAGAUAAA |
| siRNA 2345 | 2345 | UUAUCUGCUGACCUUCCCU | 4792 | AGGGAAGGUCAGCAGAUAA |
| siRNA 2346 | 2346 | UAUCUGCUGACCUUCCCUC | 4793 | GAGGGAAGGUCAGCAGAUA |
| siRNA 2347 | 2347 | AUCUGCUGACCUUCCCUCC | 4794 | GGAGGGAAGGUCAGCAGAU |
| siRNA 2348 | 2348 | UCUGCUGACCUUCCCUCCA | 4795 | UGGAGGGAAGGUCAGCAGA |
| siRNA 2349 | 2349 | CUGCUGACCUUCCCUCCAC | 4796 | GUGGAGGGAAGGUCAGCAG |
| siRNA 2350 | 2350 | UGCUGACCUUCCCUCCACU | 4797 | AGUGGAGGGAAGGUCAGCA |
| siRNA 2351 | 2351 | GCUGACCUUCCCUCCACUA | 4798 | UAGUGGAGGGAAGGUCAGC |
| siRNA 2352 | 2352 | CUGACCUUCCCUCCACUAU | 4799 | AUAGUGGAGGGAAGGUCAG |
| siRNA 2353 | 2353 | UGACCUUCCCUCCACUAUU | 4800 | AAUAGUGGAGGGAAGGUCA |
| siRNA 2354 | 2354 | GACCUUCCCUCCACUAUUG | 4801 | CAAUAGUGGAGGGAAGGUC |
| siRNA 2355 | 2355 | ACCUUCCCUCCACUAUUGU | 4802 | ACAAUAGUGGAGGGAAGGU |
| siRNA 2356 | 2356 | CCUUCCCUCCACUAUUGUC | 4803 | GACAAUAGUGGAGGGAAGG |
| siRNA 2357 | 2357 | CUUCCCUCCACUAUUGUCC | 4804 | GGACAAUAGUGGAGGGAAG |
| siRNA 2358 | 2358 | UUCCCUCCACUAUUGUCCU | 4805 | AGGACAAUAGUGGAGGGAA |
| siRNA 2359 | 2359 | UCCCUCCACUAUUGUCCUA | 4806 | UAGGACAAUAGUGGAGGGA |
| siRNA 2360 | 2360 | CCCUCCACUAUUGUCCUAU | 4807 | AUAGGACAAUAGUGGAGGG |
| siRNA 2361 | 2361 | CCUCCACUAUUGUCCUAUG | 4808 | CAUAGGACAAUAGUGGAGG |
| siRNA 2362 | 2362 | CUCCACUAUUGUCCUAUGA | 4809 | UCAUAGGACAAUAGUGGAG |
| siRNA 2363 | 2363 | UCCACUAUUGUCCUAUGAC | 4810 | GUCAUAGGACAAUAGUGGA |
| siRNA 2364 | 2364 | CCACUAUUGUCCUAUGACC | 4811 | GGUCAUAGGACAAUAGUGG |
| siRNA 2365 | 2365 | CACUAUUGUCCUAUGACCC | 4812 | GGGUCAUAGGACAAUAGUG |
| siRNA 2366 | 2366 | ACUAUUGUCCUAUGACCCU | 4813 | AGGGUCAUAGGACAAUAGU |
| siRNA 2367 | 2367 | CUAUUGUCCUAUGACCCUG | 4814 | CAGGGUCAUAGGACAAUAG |
| siRNA 2368 | 2368 | UAUUGUCCUAUGACCCUGC | 4815 | GCAGGGUCAUAGGACAAUA |
| siRNA 2369 | 2369 | AUUGUCCUAUGACCCUGCC | 4816 | GGCAGGGUCAUAGGACAAU |
| siRNA 2370 | 2370 | UUGUCCUAUGACCCUGCCA | 4817 | UGGCAGGGUCAUAGGACAA |
| siRNA 2371 | 2371 | UGUCCUAUGACCCUGCCAA | 4818 | UUGGCAGGGUCAUAGGACA |
| siRNA 2372 | 2372 | GUCCUAUGACCCUGCCAAA | 4819 | UUUGGCAGGGUCAUAGGAC |
| siRNA 2373 | 2373 | UCCUAUGACCCUGCCAAAU | 4820 | AUUUGGCAGGGUCAUAGGA |
| siRNA 2374 | 2374 | CCUAUGACCCUGCCAAAUC | 4821 | GAUUUGGCAGGGUCAUAGG |
| siRNA 2375 | 2375 | CUAUGACCCUGCCAAAUCC | 4822 | GGAUUUGGCAGGGUCAUAG |
| siRNA 2376 | 2376 | UAUGACCCUGCCAAAUCCC | 4823 | GGGAUUUGGCAGGGUCAUA |
| siRNA 2377 | 2377 | AUGACCCUGCCAAAUCCCC | 4824 | GGGGAUUUGGCAGGGUCAU |
| siRNA 2378 | 2378 | UGACCCUGCCAAAUCCCCC | 4825 | GGGGGAUUUGGCAGGGUCA |
| siRNA 2379 | 2379 | GACCCUGCCAAAUCCCCCU | 4826 | AGGGGGAUUUGGCAGGGUC |
| siRNA 2380 | 2380 | ACCCUGCCAAAUCCCCCUC | 4827 | GAGGGGGAUUUGGCAGGGU |
| siRNA 2381 | 2381 | CCCUGCCAAAUCCCCCUCU | 4828 | AGAGGGGGAUUUGGCAGGG |
| siRNA 2382 | 2382 | CCUGCCAAAUCCCCCUCUG | 4829 | CAGAGGGGGAUUUGGCAGG |
| siRNA 2383 | 2383 | CUGCCAAAUCCCCCUCUGU | 4830 | ACAGAGGGGGAUUUGGCAG |
| siRNA 2384 | 2384 | UGCCAAAUCCCCCUCUGUG | 4831 | CACAGAGGGGGAUUUGGCA |
| siRNA 2385 | 2385 | GCCAAAUCCCCCUCUGUGA | 4832 | UCACAGAGGGGGAUUUGGC |
| siRNA 2386 | 2386 | CCAAAUCCCCCUCUGUGAG | 4833 | CUCACAGAGGGGGAUUUGG |
| siRNA 2387 | 2387 | CAAAUCCCCCUCUGUGAGA | 4834 | UCUCACAGAGGGGGAUUUG |
| siRNA 2388 | 2388 | AAAUCCCCCUCUGUGAGAA | 4835 | UUCUCACAGAGGGGGAUUU |
| siRNA 2389 | 2389 | AAUCCCCCUCUGUGAGAAA | 4836 | UUUCUCACAGAGGGGGAUU |
| siRNA 2390 | 2390 | AUCCCCCUCUGUGAGAAAC | 4837 | GUUUCUCACAGAGGGGGAU |
| siRNA 2391 | 2391 | UCCCCCUCUGUGAGAAACA | 4838 | UGUUUCUCACAGAGGGGGA |
| siRNA 2392 | 2392 | CCCCCUCUGUGAGAAACAC | 4839 | GUGUUUCUCACAGAGGGGG |
| siRNA 2393 | 2393 | CCCCUCUGUGAGAAACACC | 4840 | GGUGUUUCUCACAGAGGGG |
| siRNA 2394 | 2394 | CCCUCUGUGAGAAACACCC | 4841 | GGGUGUUUCUCACAGAGGG |
| siRNA 2395 | 2395 | CCUCUGUGAGAAACACCCA | 4842 | UGGGUGUUUCUCACAGAGG |
| siRNA 2396 | 2396 | CUCUGUGAGAAACACCCAA | 4843 | UUGGGUGUUUCUCACAGAG |
| siRNA 2397 | 2397 | UCUGUGAGAAACACCCAAG | 4844 | CUUGGGUGUUUCUCACAGA |
| siRNA 2398 | 2398 | CUGUGAGAAACACCCAAGA | 4845 | UCUUGGGUGUUUCUCACAG |
| siRNA 2399 | 2399 | UGUGAGAAACACCCAAGAA | 4846 | UUCUUGGGUGUUUCUCACA |
| siRNA 2400 | 2400 | GUGAGAAACACCCAAGAAU | 4847 | AUUCUUGGGUGUUUCUCAC |
| siRNA 2401 | 2401 | UGAGAAACACCCAAGAAUG | 4848 | CAUUCUUGGGUGUUUCUCA |
| siRNA 2402 | 2402 | GAGAAACACCCAAGAAUGG | 4849 | CCAUUCUUGGGUGUUUCUC |
| siRNA 2403 | 2403 | AGAAACACCCAAGAAUGGU | 4850 | ACCAUUCUUGGGUGUUUCU |
| siRNA 2404 | 2404 | GAAACACCCAAGAAUGGUC | 4851 | GACCAUUCUUGGGUGUUUC |
| siRNA 2405 | 2405 | AAACACCCAAGAAUGGUCA | 4852 | UGACCAUUCUUGGGUGUUU |
| siRNA 2406 | 2406 | AACACCCAAGAAUGGUCAA | 4853 | UUGACCAUUCUUGGGUGUU |
| siRNA 2407 | 2407 | ACACCCAAGAAUGGUCAAU | 4854 | AUUGACCAUUCUUGGGUGU |
| siRNA 2408 | 2408 | CACCCAAGAAUGGUCAAUA | 4855 | UAUUGACCAUUCUUGGGUG |
| siRNA 2409 | 2409 | ACCCAAGAAUGGUCAAUAA | 4856 | UUAUUGACCAUUCUUGGGU |
| siRNA 2410 | 2410 | CCCAAGAAUGGUCAAUAAA | 4857 | UUUAUUGACCAUUCUUGGG |
| siRNA 2411 | 2411 | CCAAGAAUGGUCAAUAAAA | 4858 | UUUUAUUGACCAUUCUUGG |
| siRNA 2412 | 2412 | CAAGAAUGGUCAAUAAAAA | 4859 | UUUUUAUUGACCAUUCUUG |
| siRNA 2413 | 2413 | AAGAAUGGUCAAUAAAAAA | 4860 | UUUUUUAUUGACCAUUCUU |
| siRNA 2414 | 2414 | AGAAUGGUCAAUAAAAAAU | 4861 | AUUUUUUAUUGACCAUUCU |
| siRNA 2415 | 2415 | GAAUGGUCAAUAAAAAAUU | 4862 | AAUUUUUUAUUGACCAUUC |
| siRNA 2416 | 2416 | AAUGGUCAAUAAAAAAUUA | 4863 | UAAUUUUUUAUUGACCAUU |
| siRNA 2417 | 2417 | AUGGUCAAUAAAAAAUUAA | 4864 | UUAAUUUUUUAUUGACCAU |
| siRNA 2418 | 2418 | UGGUCAAUAAAAAAUUAAA | 4865 | UUUAAUUUUUUAUUGACCA |
| siRNA 2419 | 2419 | GGUCAAUAAAAAAUUAAAU | 4866 | AUUUAAUUUUUUAUUGACC |
| siRNA 2420 | 2420 | GUCAAUAAAAAAUUAAAUA | 4867 | UAUUUAAUUUUUUAUUGAC |
| siRNA 2421 | 2421 | UCAAUAAAAAAUUAAAUAA | 4868 | UUAUUUAAUUUUUUAUUGA |
| siRNA 2422 | 2422 | CAAUAAAAAAUUAAAUAAA | 4869 | UUUAUUUAAUUUUUUAUUG |
| siRNA 2423 | 2423 | AAUAAAAAAUUAAAUAAAU | 4870 | AUUUAUUUAAUUUUUUAUU |
| siRNA 2424 | 2424 | AUAAAAAAUUAAAUAAAUA | 4871 | UAUUUAUUUAAUUUUUUAU |
| siRNA 2425 | 2425 | UAAAAAAUUAAAUAAAUAA | 4872 | UUAUUUAUUUAAUUUUUUA |
| siRNA 2426 | 2426 | AAAAAAUUAAAUAAAUAAA | 4873 | UUUAUUUAUUUAAUUUUUU |
| siRNA 2427 | 2427 | AAAAAUUAAAUAAAUAAAU | 4874 | AUUUAUUUAUUUAAUUUUU |
| siRNA 2428 | 2428 | AAAAUUAAAUAAAUAAAUA | 4875 | UAUUUAUUUAUUUAAUUUU |
| siRNA 2429 | 2429 | AAAUUAAAUAAAUAAAUAA | 4876 | UUAUUUAUUUAUUUAAUUU |
| siRNA 2430 | 2430 | AAUUAAAUAAAUAAAUAAA | 4877 | UUUAUUUAUUUAUUUAAUU |
| siRNA 2431 | 2431 | AUUAAAUAAAUAAAUAAAU | 4878 | AUUUAUUUAUUUAUUUAAU |
| siRNA 2432 | 2432 | UUAAAUAAAUAAAUAAAUA | 4879 | UAUUUAUUUAUUUAUUUAA |
| siRNA 2433 | 2433 | UAAAUAAAUAAAUAAAUAA | 4880 | UUAUUUAUUUAUUUAUUUA |
| siRNA 2434 | 2434 | AAAUAAAUAAAUAAAUAAA | 4881 | UUUAUUUAUUUAUUUAUUU |
| siRNA 2435 | 2435 | AAUAAAUAAAUAAAUAAAU | 4882 | AUUUAUUUAUUUAUUUAUU |
| siRNA 2436 | 2436 | AUAAAUAAAUAAAUAAAUA | 4883 | UAUUUAUUUAUUUAUUUAU |
| siRNA 2437 | 2437 | UAAAUAAAUAAAUAAAUAA | 4884 | UUAUUUAUUUAUUUAUUUA |
| siRNA 2438 | 2438 | AAAUAAAUAAAUAAAUAAA | 4885 | UUUAUUUAUUUAUUUAUUU |
| siRNA 2439 | 2439 | AAUAAAUAAAUAAAUAAAU | 4886 | AUUUAUUUAUUUAUUUAUU |
| siRNA 2440 | 2440 | AUAAAUAAAUAAAUAAAUA | 4887 | UAUUUAUUUAUUUAUUUAU |
| siRNA 2441 | 2441 | UAAAUAAAUAAAUAAAUAA | 4888 | UUAUUUAUUUAUUUAUUUA |
| siRNA 2442 | 2442 | AAAUAAAUAAAUAAAUAAA | 4889 | UUUAUUUAUUUAUUUAUUU |
| siRNA 2443 | 2443 | AAUAAAUAAAUAAAUAAAA | 4890 | UUUUAUUUAUUUAUUUAUU |
| siRNA 2444 | 2444 | AUAAAUAAAUAAAUAAAAA | 4891 | UUUUUAUUUAUUUAUUUAU |
| siRNA 2445 | 2445 | UAAAUAAAUAAAUAAAAAG | 4892 | CUUUUUAUUUAUUUAUUUA |
| siRNA 2446 | 2446 | AAAUAAAUAAAUAAAAAGU | 4893 | ACUUUUUAUUUAUUUAUUU |
| siRNA 2447 | 2447 | AAUAAAUAAAUAAAAAGUA | 4894 | UACUUUUUAUUUAUUUAUU |

TABLE 20B
Additional Sequence(s)

| SEQ ID | |
|---|---|
| NO: | 5′ to 3′ Sequence |
| 5117 | AGAAGUUCUCAACACAUCCUUUAAGGUUCCAAACAUCUACUAGAAAAGGAGUGCAGAUU |
| | UAAACUGAGUGAGGUGUGGAGUGGGGGAAGCUGACUGUGUCUGGAACAAAGAACUUUGA |
| | GGAACUUGCCCAGAGCCCUGCACUCAUCAGACCUGCAGCAGACAUUGCAGGCCUGAAGA |
| | AAGCACCUUUUCUGCUGCCAUGACAACCAUGCAAGGAAUGGAACAGACCACUCCAGGGG |
| | CUGGCCCUGAUGUGCCCCAGCUGGGAAACAUAGAUGUCAUACAUUCAUAUCUGUGUAAA |
| | GGAUUGCAAGAGAAGUUCUUCAAGAGGAAACCCAAAGUCCUUGGGGUUUUGUGUGGACA |
| | UAAGUUUUCAACUCAUUCGGUAUCCUUAUCAGUUGCAGCAGGAAUUAGAACAACAAAAG |
| | GUCUGGUUGGAGGUAGUCUAGGAAAGAAUAUCACCAGUUCAGUCUUGGCUAUAUCAGGG |
| | AUCUUAAUCAAUGCAAUAAGCUUGACGUUUUAUUCAUUCCGUUACCAUUACUGUAACCA |
| | CGAUCAGUUGUCAAGUAAUUGUUACAUGACUAUGUCCAUUUUAAUGGGUACGGAUGGCA |
| | UGGUGCUCCUCUUAAGUGUGCUGGAAUUCUGCAUUGCUGUGGCCCUCUCUGCCUUUGGA |
| | UGUAAAGUGCUUUGUUGUAGCCCCAGUGAGAGCAAAAAUAAAAUUAGAAGCAAUACUUU |
| | CAUGUGCUACCUCCUUUCUAUUCAGAUGCAAUAUGAUGGAAAGAGACUAAAUGUUGAUG |
| | UCGACAGUACUGUAUGGUGCUCCGGAGAUGGACAGUAUCUGGAAAAAGUCUAUUAUGAC |
| | AUUCUAUCUUCUUGGUUGAGGAUUGAAAGUAUUUAUCGAGUGCUCAAUGGUGCCCAGGC |
| | UGGAGUGCAGUGGCGUGAUCUCGGCUCCCUACAACCUCCACCUCCCAGCCGCCUGCCUU |
| | GGCCUCCCAAAGUGCCGAGAGUGCAGCCUCUGCCCGGCCGCCACCCCGUCUGGGAAGUG |
| | AGGAGCGUCUCUGCCUGGCCGCCUAUCGUCUGGGACGUGAGGAGCCCCUCUGCCUGGCU |
| | GCCCAGUCUGGAAAGUGAGGAGCGUCUCUGCCCGGCUGCCAUCCCAUCUAGGAAGUGGG |
| | GAGCGCCUCUUCCCGGCCACCAUCCCAUCUGGGAGGUGAGGAGUGUCUCCGCCCGGCCG |
| | CCCAUCUUCUGAGAUGUGGGGAGCGCCUUUGCCCCACCGCCCUGUCUGGGAUGUGAGGA |
| | GCACCUCUGCCCGGCCGCGACCCCGUCUGGGAGGUGAGGAGCGUCUCUGCCCAGCCGCC |
| | CCAUCUGAGAAGGGAGGAGACCCUCCGCCUGGCAACCGCCCCGUCUGAGAAGUGAGGAG |
| | CCCCUCCGCCCGGCAGCCACCCCGUCUGGGAAGUGAGGAGCGUCUCCGCCAGGCAGCCA |
| | CCCCGUCCGGGAGGGAGGUGGGGGUCAGCCCCCGCCAGGCCAGCUGCCCCAUCCGGGAG |
| | GGAGGUGGGGGGGGUCAGCCCCCCGCCCGGCCAGCCGCCCCGUCCGGGAGGUGAGGGGC |
| | GCCUCUGCCCAGCCGCCCCUACUGGGAAGUGAGGAGCCCCUCUACCCGGCCAGCCGCUC |
| | CGUCCGGGAGGGAGGUGGGGGGGUCAGACCCCGCCCGGCCAGCCGCCCCGUCCGGGAGG |
| | GAGGUGGGGGGUUCAGCCCCCCACCCGGCCAGCCACCACGUCUGGGAGGGAGGUGGGGG |
| | GGUCAGCCCUCUGCCCGGCCAGCCGCCCCGUCCGGGAGGGAGGUGGGGGGUUCAGCCCC |
| | CCACCCGGCCAGCCGCCCCGUCCGGGAGGGAGGUGGAGGGGUCAGCCCCCCGCCCGGCC |
| | AGCCGCCCCGUCCGGGAGGUGAGGGGUGCCUCUGCCCAGCCGCCCCUACUGGGAAGUGA |
| | GGAGCCCCUCUGCCCGGCCACCACCCCAUCUGGGAAGUGUACCCAAUAGCUCAUUGAGA |
| | ACGGGCCAUGAGGACAAUGGCGGUUUUGUGGAAUAGAAAGGGGGGAAAGGUGGGGAAAA |
| | GAUUGAGAAAUCGGAUGGUUGCCUUGUCUGUGUGGAAAGAAGUAGACAUGGGAGACUUU |
| | UCAUUUUGUUCUGUACUAAGAAAAAUUCUUCUGCCUUGGGAUCCUGUUGAUCUGUGACC |
| | UUACCCCCAACCCUGUGCUCUCUGAAACAUGUGCUGUGUCCACUCAGGGUUAAAUGGAU |
| | UAAGGGCGGUGCAAGGUGUGCUUUGUUAAACAGAUGCUUGAAGGCAGCAUGCUCGUUAA |
| | GAGUCAUCACCACUCCCUAAUCUCAAGUACCCAGGGACACAAACACCUCGGAAGGCCGC |
| | AGGGUCCUCUGCCUAGGAAAACCAGAGACCUUUGUUCACUUGUUUAUCUGCUGACCUUC |
| | CCUCCACUAUUGUCCUAUGACCCUGCCAAAUCCCCCUCUGUGAGAAACACCCAAGAAUG |
| | GUCAAUAAAAAAUUAAAUAAAUAAAUAAAUAAAUAAAUAAAAAGUA |

What is claimed is:

1. A composition comprising an MS4A4E inhibitor that when administered to a subject in an effective amount decreases a liver disease measurement in the subject.

2. The composition of claim 1, wherein the liver disease measurement comprises a liver fat percentage measurement, a liver fibrosis score, a nonalcoholic fatty liver disease (NAFLD) activity score, a blood alanine aminotransferase (ALT) measurement, a blood aspartate aminotransferase (AST) measurement, or a blood gamma-glutamyl transferase (GGT) measurement.

3. The composition of claim 1, wherein the liver disease measurement is decreased by about 10% or more, as compared to prior to administration.

4. A composition comprising an MS4A4E inhibitor that when administered to a subject in an effective amount decreases a metabolic disorder measurement in the subject, or increases a beneficial metabolic parameter measurement in the subject.

5. The composition of claim 4, wherein the beneficial metabolic parameter measurement comprises a blood high-density lipoprotein (HDL) measurement.

6. The composition of claim 4, wherein the metabolic disorder measurement comprises a blood triglyceride measurement, a blood hemoglobin A1C measurement, a body mass index (BMI), a body weight, a waist circumference, a body fat percentage, a blood glucose measurement, a glucose tolerance measurement, an insulin sensitivity measurement, or a non-HDL cholesterol measurement.

7. The composition of claim 4, wherein the metabolic disorder measurement is decreased by about 10% or more, as compared to prior to administration.

8. The composition of claim 4, wherein the beneficial metabolic parameter measurement is increased by about 10% or more, as compared to prior to administration.

9. The composition of any one of claims 1-8, wherein the MS4A4E inhibitor comprises an oligonucleotide that targets MS4A4E.

10. The composition of claim 9, wherein the oligonucleotide comprises a modified internucleoside linkage.

11. The composition of claim 10, wherein the modified internucleoside linkage comprises alkylphosphonate, phosphorothioate, methylphosphonate, phosphorodithioate, alkylphosphonothioate, phosphoramidate, carbamate, carbonate, phosphate triester, acetamidate, or carboxymethyl ester, or a combination thereof.

12. The composition of claim 10, wherein the modified internucleoside linkage comprises one or more phosphorothioate linkages.

13. The composition of claim 9, wherein the oligonucleotide comprises 1, 2, 3, 4, 5, 6, 7, 8, 9, 10, 11, 12, 13, 14, 15, 16, 17, 18, 19, or 20 modified internucleoside linkages.

14. The composition of claim 9, wherein the oligonucleotide comprises a modified nucleoside.

15. The composition of claim 14, wherein the modified nucleoside comprises a locked nucleic acid (LNA), hexitol nucleic acid (HLA), cyclohexene nucleic acid (CeNA), 2′-methoxyethyl, 2′-O-alkyl, 2′-O-allyl, 2′-O-allyl, 2′-fluoro, or 2′-deoxy, or a combination thereof.

16. The composition of claim 14, wherein the modified nucleoside comprises a LNA.

17. The composition of claim 14, wherein the modified nucleoside comprises a 2′,4′ constrained ethyl nucleic acid.

18. The composition of claim 14, wherein the modified nucleoside comprises a 2′-O-methyl nucleoside, 2′-deoxyfluoro nucleoside, 2′-O—N-methylacetamido (2′-O-NMA) nucleoside, a 2′-O— dimethylaminoethoxyethyl (2′-O-DMAEOE) nucleoside, 2′-O-aminopropyl (2′-O-AP) nucleoside, or 2′-ara-F, or a combination thereof.

19. The composition of claim 14, wherein the modified nucleoside comprises one or more 2′fluoro modified nucleosides.

20. The composition of claim 14, wherein the modified nucleoside comprises a 2′ O-alkyl modified nucleoside.

21. The composition of claim 9, wherein the oligonucleotide comprises 1, 2, 3, 4, 5, 6, 7, 8, 9, 10, 11, 12, 13, 14, 15, 16, 17, 18, 19, 20, or 21 modified nucleosides.

22. The composition of claim 9, wherein the oligonucleotide comprises a lipid attached at a 3′ or 5′ terminus of the oligonucleotide.

23. The composition of claim 22, wherein the lipid comprises cholesterol, myristoyl, palmitoyl, stearoyl, lithocholoyl, docosanoyl, docosahexaenoyl, myristyl, palmityl stearyl, or α-tocopherol, or a combination thereof.

24. The composition of claim 9, wherein the oligonucleotide comprises an N-acetylgalactosamine (GalNAc) moiety, an N-acetylglucosamine (GlcNAc) moiety, or a mannose moiety, attached at a 3′ or 5′ terminus of the oligonucleotide.

25. The composition of claim 9, wherein the oligonucleotide comprises a small interfering RNA (siRNA) comprising a sense strand and an antisense strand.

26. The composition of claim 25, wherein the sense strand is 12-30 nucleosides in length.

27. The composition of claim 25, wherein the antisense strand is 12-30 nucleosides in length.

28. A composition comprising an oligonucleotide that inhibits the expression of MS4A4E, wherein the oligonucleotide comprises an siRNA comprising a sense strand and an antisense strand, each strand is independently about 12-30 nucleosides in length, and at least one of the sense strand and the antisense strand comprises a nucleoside sequence comprising about 12-30 contiguous nucleosides of SEQ ID NO: 5117.

29. The composition of claim 9, wherein any one of the following is true with regard to the sense strand:
all purines comprise 2′ fluoro modified purines, and all pyrimidines comprise a mixture of 2′ fluoro and 2′ methyl modified pyrimidines;
all purines comprise 2′ methyl modified purines, and all pyrimidines comprise a mixture of 2′ fluoro and 2′ methyl modified pyrimidines;
all purines comprise 2′ fluoro modified purines, and all pyrimidines comprise 2′ methyl modified pyrimidines;
all pyrimidines comprise 2′ fluoro modified pyrimidines, and all purines comprise a mixture of 2′ fluoro and 2′ methyl modified purines;
all pyrimidines comprise 2′ methyl modified pyrimidines, and all purines comprise a mixture of 2′ fluoro and 2′ methyl modified purines; or
all pyrimidines comprise 2′ fluoro modified pyrimidines, and all purines comprise 2′ methyl modified purines.

30. The composition of claim 25, wherein any one of the following is true with regard to the antisense strand:
all purines comprise 2′ fluoro modified purines, and all pyrimidines comprise a mixture of 2′ fluoro and 2′ methyl modified pyrimidines;
all purines comprise 2′ methyl modified purines, and all pyrimidines comprise a mixture of 2′ fluoro and 2′ methyl modified pyrimidines;
all purines comprise 2′ methyl modified purines, and all pyrimidines comprise 2′ fluoro modified pyrimidines;
all pyrimidines comprise 2′ fluoro modified pyrimidines, and all purines comprise a mixture of 2′ fluoro and 2′ methyl modified purines;
all pyrimidines comprise 2′ methyl modified pyrimidines, and all purines comprise a mixture of 2′ fluoro and 2′ methyl modified purines; or
all pyrimidines comprise 2′ methyl modified pyrimidines, and all purines comprise 2′ fluoro modified purines.

31. The composition of claim 9, wherein the oligonucleotide comprises an antisense oligonucleotide (ASO).

32. The composition of claim 31, wherein the ASO is 12-30 nucleosides in length.

33. A composition comprising an oligonucleotide that inhibits the expression of MS4A4E, wherein the oligonucleotide comprises an ASO about 12-30 nucleosides in length and a nucleoside sequence complementary to about 12-30 contiguous nucleosides of SEQ ID NO: 5117.

34. A pharmaceutical composition comprising the composition of claim 9, and further comprising a pharmaceutically acceptable carrier.

35. A method of treating a subject having non-alcoholic fatty liver disease (NAFLD), non-alcoholic steatohepatitis (NASH), liver fibrosis, liver cirrhosis, diabetes, obesity, metabolic syndrome, hyperlipidemia, hypertriglyceridemia, or heart disease, comprising administering an effective amount of the composition of claim 34 to the subject.

The application's sequence listing, which the Patent Office published only in electronic form, follows.

SEQUENCE LISTING (5117 sequences)

SEQ ID NO: 1 - RNA, 19 nt, synthetic construct
  source 1..19: mol_type = other RNA
agaagttctcaacacatcc

SEQ ID NO: 2 - RNA, 19 nt, synthetic construct
  source 1..19: mol_type = other RNA
gaagttctcaacacatcct

SEQ ID NO: 3 - RNA, 19 nt, synthetic construct
  source 1..19: mol_type = other RNA
aagttctcaacacatcctt

SEQ ID NO: 4 - RNA, 19 nt, synthetic construct
  source 1..19: mol_type = other RNA
agttctcaacacatccttt

SEQ ID NO: 5 - RNA, 19 nt, synthetic construct
  source 1..19: mol_type = other RNA
gttctcaacacatccttta

SEQ ID NO: 6 - RNA, 19 nt, synthetic construct
  source 1..19: mol_type = other RNA
ttctcaacacatcctttaa

SEQ ID NO: 7 - RNA, 19 nt, synthetic construct
  source 1..19: mol_type = other RNA
tctcaacacatcctttaag

SEQ ID NO: 8 - RNA, 19 nt, synthetic construct
  source 1..19: mol_type = other RNA
ctcaacacatcctttaagg

SEQ ID NO: 9 - RNA, 19 nt, synthetic construct
  source 1..19: mol_type = other RNA
tcaacacatcctttaaggt

SEQ ID NO: 10 - RNA, 19 nt, synthetic construct
  source 1..19: mol_type = other RNA
caacacatcctttaaggtt

SEQ ID NO: 11 - RNA, 19 nt, synthetic construct
  source 1..19: mol_type = other RNA
aacacatcctttaaggttc

SEQ ID NO: 12 - RNA, 19 nt, synthetic construct
  source 1..19: mol_type = other RNA
acacatcctttaaggttcc

SEQ ID NO: 13 - RNA, 19 nt, synthetic construct
  source 1..19: mol_type = other RNA
cacatcctttaaggttcca

SEQ ID NO: 14 - RNA, 19 nt, synthetic construct
  source 1..19: mol_type = other RNA
acatcctttaaggttccaa

SEQ ID NO: 15 - RNA, 19 nt, synthetic construct
  source 1..19: mol_type = other RNA
catcctttaaggttccaaa

SEQ ID NO: 16 - RNA, 19 nt, synthetic construct
  source 1..19: mol_type = other RNA
atcctttaaggttccaaac

SEQ ID NO: 17 - RNA, 19 nt, synthetic construct
  source 1..19: mol_type = other RNA
tcctttaaggttccaaaca

SEQ ID NO: 18 - RNA, 19 nt, synthetic construct
  source 1..19: mol_type = other RNA
cctttaaggttccaaacat

SEQ ID NO: 19 - RNA, 19 nt, synthetic construct
  source 1..19: mol_type = other RNA
ctttaaggttccaaacatc

SEQ ID NO: 20 - RNA, 19 nt, synthetic construct
  source 1..19: mol_type = other RNA
tttaaggttccaaacatct

SEQ ID NO: 21 - RNA, 19 nt, synthetic construct
  source 1..19: mol_type = other RNA
ttaaggttccaaacatcta

SEQ ID NO: 22 - RNA, 19 nt, synthetic construct
  source 1..19: mol_type = other RNA
taaggttccaaacatctac

SEQ ID NO: 23 - RNA, 19 nt, synthetic construct
  source 1..19: mol_type = other RNA
aaggttccaaacatctact

SEQ ID NO: 24 - RNA, 19 nt, synthetic construct
  source 1..19: mol_type = other RNA
aggttccaaacatctacta

SEQ ID NO: 25 - RNA, 19 nt, synthetic construct
  source 1..19: mol_type = other RNA
ggttccaaacatctactag

SEQ ID NO: 26 - RNA, 19 nt, synthetic construct
  source 1..19: mol_type = other RNA
gttccaaacatctactaga

SEQ ID NO: 27 - RNA, 19 nt, synthetic construct
  source 1..19: mol_type = other RNA
ttccaaacatctactagaa

SEQ ID NO: 28 - RNA, 19 nt, synthetic construct
  source 1..19: mol_type = other RNA
tccaaacatctactagaaa

SEQ ID NO: 29 - RNA, 19 nt, synthetic construct
  source 1..19: mol_type = other RNA
ccaaacatctactagaaaa

SEQ ID NO: 30 - RNA, 19 nt, synthetic construct
  source 1..19: mol_type = other RNA
caaacatctactagaaaag

SEQ ID NO: 31 - RNA, 19 nt, synthetic construct
  source 1..19: mol_type = other RNA
aaacatctactagaaaagg

SEQ ID NO: 32 - RNA, 19 nt, synthetic construct
  source 1..19: mol_type = other RNA
aacatctactagaaaagga

SEQ ID NO: 33 - RNA, 19 nt, synthetic construct
  source 1..19: mol_type = other RNA
acatctactagaaaaggag

SEQ ID NO: 34 - RNA, 19 nt, synthetic construct
  source 1..19: mol_type = other RNA
catctactagaaaaggagt

SEQ ID NO: 35 - RNA, 19 nt, synthetic construct
  source 1..19: mol_type = other RNA
atctactagaaaaggagtg

SEQ ID NO: 36 - RNA, 19 nt, synthetic construct
  source 1..19: mol_type = other RNA
tctactagaaaaggagtgc

SEQ ID NO: 37 - RNA, 19 nt, synthetic construct
  source 1..19: mol_type = other RNA
ctactagaaaaggagtgca

SEQ ID NO: 38 - RNA, 19 nt, synthetic construct
  source 1..19: mol_type = other RNA
tactagaaaaggagtgcag

SEQ ID NO: 39 - RNA, 19 nt, synthetic construct
  source 1..19: mol_type = other RNA
actagaaaaggagtgcaga

SEQ ID NO: 40 - RNA, 19 nt, synthetic construct
  source 1..19: mol_type = other RNA
ctagaaaaggagtgcagat

SEQ ID NO: 41 - RNA, 19 nt, synthetic construct
  source 1..19: mol_type = other RNA
tagaaaaggagtgcagatt

SEQ ID NO: 42 - RNA, 19 nt, synthetic construct
  source 1..19: mol_type = other RNA
agaaaaggagtgcagattt

SEQ ID NO: 43 - RNA, 19 nt, synthetic construct
  source 1..19: mol_type = other RNA
gaaaaggagtgcagattta

SEQ ID NO: 44 - RNA, 19 nt, synthetic construct
  source 1..19: mol_type = other RNA
aaaaggagtgcagatttaa

SEQ ID NO: 45 - RNA, 19 nt, synthetic construct
  source 1..19: mol_type = other RNA
aaaggagtgcagatttaaa

SEQ ID NO: 46 - RNA, 19 nt, synthetic construct
  source 1..19: mol_type = other RNA
aaggagtgcagatttaaac

SEQ ID NO: 47 - RNA, 19 nt, synthetic construct
  source 1..19: mol_type = other RNA
aggagtgcagatttaaact

SEQ ID NO: 48 - RNA, 19 nt, synthetic construct
  source 1..19: mol_type = other RNA
ggagtgcagatttaaactg

SEQ ID NO: 49 - RNA, 19 nt, synthetic construct
  source 1..19: mol_type = other RNA
gagtgcagatttaaactga

SEQ ID NO: 50 - RNA, 19 nt, synthetic construct
  source 1..19: mol_type = other RNA
agtgcagatttaaactgag

SEQ ID NO: 51 - RNA, 19 nt, synthetic construct
  source 1..19: mol_type = other RNA
gtgcagatttaaactgagt

SEQ ID NO: 52 - RNA, 19 nt, synthetic construct
  source 1..19: mol_type = other RNA
tgcagatttaaactgagtg

SEQ ID NO: 53 - RNA, 19 nt, synthetic construct
  source 1..19: mol_type = other RNA
gcagatttaaactgagtga

SEQ ID NO: 54 - RNA, 19 nt, synthetic construct
  source 1..19: mol_type = other RNA
cagatttaaactgagtgag

SEQ ID NO: 55 - RNA, 19 nt, synthetic construct
  source 1..19: mol_type = other RNA
agatttaaactgagtgagg

SEQ ID NO: 56 - RNA, 19 nt, synthetic construct
  source 1..19: mol_type = other RNA
gatttaaactgagtgaggt

SEQ ID NO: 57 - RNA, 19 nt, synthetic construct
  source 1..19: mol_type = other RNA
atttaaactgagtgaggtg

SEQ ID NO: 58 - RNA, 19 nt, synthetic construct
  source 1..19: mol_type = other RNA
tttaaactgagtgaggtgt

SEQ ID NO: 59 - RNA, 19 nt, synthetic construct
  source 1..19: mol_type = other RNA
ttaaactgagtgaggtgtg

SEQ ID NO: 60 - RNA, 19 nt, synthetic construct
  source 1..19: mol_type = other RNA
taaactgagtgaggtgtgg

SEQ ID NO: 61 - RNA, 19 nt, synthetic construct
  source 1..19: mol_type = other RNA
aaactgagtgaggtgtgga

SEQ ID NO: 62 - RNA, 19 nt, synthetic construct
  source 1..19: mol_type = other RNA
aactgagtgaggtgtggag

SEQ ID NO: 63 - RNA, 19 nt, synthetic construct
  source 1..19: mol_type = other RNA
actgagtgaggtgtggagt

SEQ ID NO: 64 - RNA, 19 nt, synthetic construct
  source 1..19: mol_type = other RNA
ctgagtgaggtgtggagtg

SEQ ID NO: 65 - RNA, 19 nt, synthetic construct
  source 1..19: mol_type = other RNA
tgagtgaggtgtggagtgg

SEQ ID NO: 66 - RNA, 19 nt, synthetic construct
  source 1..19: mol_type = other RNA
gagtgaggtgtggagtggg

SEQ ID NO: 67 - RNA, 19 nt, synthetic construct
  source 1..19: mol_type = other RNA
agtgaggtgtggagtgggg

SEQ ID NO: 68 - RNA, 19 nt, synthetic construct
  source 1..19: mol_type = other RNA
gtgaggtgtggagtggggg

SEQ ID NO: 69 - RNA, 19 nt, synthetic construct
  source 1..19: mol_type = other RNA
tgaggtgtggagtggggga

SEQ ID NO: 70 - RNA, 19 nt, synthetic construct
  source 1..19: mol_type = other RNA
gaggtgtggagtgggggaa

SEQ ID NO: 71 - RNA, 19 nt, synthetic construct
  source 1..19: mol_type = other RNA
aggtgtggagtgggggaag

SEQ ID NO: 72 - RNA, 19 nt, synthetic construct
  source 1..19: mol_type = other RNA
ggtgtggagtgggggaagc

SEQ ID NO: 73 - RNA, 19 nt, synthetic construct
  source 1..19: mol_type = other RNA
gtgtggagtgggggaagct

SEQ ID NO: 74 - RNA, 19 nt, synthetic construct
  source 1..19: mol_type = other RNA
tgtggagtgggggaagctg

SEQ ID NO: 75 - RNA, 19 nt, synthetic construct
  source 1..19: mol_type = other RNA
gtggagtgggggaagctga

SEQ ID NO: 76 - RNA, 19 nt, synthetic construct
  source 1..19: mol_type = other RNA
tggagtgggggaagctgac

SEQ ID NO: 77 - RNA, 19 nt, synthetic construct
  source 1..19: mol_type = other RNA
ggagtgggggaagctgact

SEQ ID NO: 78 - RNA, 19 nt, synthetic construct
  source 1..19: mol_type = other RNA
gagtgggggaagctgactg

SEQ ID NO: 79 - RNA, 19 nt, synthetic construct
  source 1..19: mol_type = other RNA
agtgggggaagctgactgt

SEQ ID NO: 80 - RNA, 19 nt, synthetic construct
  source 1..19: mol_type = other RNA
gtgggggaagctgactgtg

SEQ ID NO: 81 - RNA, 19 nt, synthetic construct
  source 1..19: mol_type = other RNA
tgggggaagctgactgtgt

SEQ ID NO: 82 - RNA, 19 nt, synthetic construct
  source 1..19: mol_type = other RNA
gggggaagctgactgtgtc

SEQ ID NO: 83 - RNA, 19 nt, synthetic construct
  source 1..19: mol_type = other RNA
ggggaagctgactgtgtct

SEQ ID NO: 84 - RNA, 19 nt, synthetic construct
  source 1..19: mol_type = other RNA
gggaagctgactgtgtctg

SEQ ID NO: 85 - RNA, 19 nt, synthetic construct
  source 1..19: mol_type = other RNA
ggaagctgactgtgtctgg

SEQ ID NO: 86 - RNA, 19 nt, synthetic construct
  source 1..19: mol_type = other RNA
gaagctgactgtgtctgga

SEQ ID NO: 87 - RNA, 19 nt, synthetic construct
  source 1..19: mol_type = other RNA
aagctgactgtgtctggaa

SEQ ID NO: 88 - RNA, 19 nt, synthetic construct
  source 1..19: mol_type = other RNA
agctgactgtgtctggaac

SEQ ID NO: 89 - RNA, 19 nt, synthetic construct
  source 1..19: mol_type = other RNA
gctgactgtgtctggaaca

SEQ ID NO: 90 - RNA, 19 nt, synthetic construct
  source 1..19: mol_type = other RNA
ctgactgtgtctggaacaa

SEQ ID NO: 91 - RNA, 19 nt, synthetic construct
  source 1..19: mol_type = other RNA
tgactgtgtctggaacaaa

SEQ ID NO: 92 - RNA, 19 nt, synthetic construct
  source 1..19: mol_type = other RNA
gactgtgtctggaacaaag

SEQ ID NO: 93 - RNA, 19 nt, synthetic construct
  source 1..19: mol_type = other RNA
actgtgtctggaacaaaga

SEQ ID NO: 94 - RNA, 19 nt, synthetic construct
  source 1..19: mol_type = other RNA
ctgtgtctggaacaaagaa

SEQ ID NO: 95 - RNA, 19 nt, synthetic construct
  source 1..19: mol_type = other RNA
tgtgtctggaacaaagaac

SEQ ID NO: 96 - RNA, 19 nt, synthetic construct
  source 1..19: mol_type = other RNA
gtgtctggaacaaagaact

SEQ ID NO: 97 - RNA, 19 nt, synthetic construct
  source 1..19: mol_type = other RNA
tgtctggaacaaagaactt

SEQ ID NO: 98 - RNA, 19 nt, synthetic construct
  source 1..19: mol_type = other RNA
gtctggaacaaagaacttt

SEQ ID NO: 99 - RNA, 19 nt, synthetic construct
  source 1..19: mol_type = other RNA
tctggaacaaagaactttg

SEQ ID NO: 100 - RNA, 19 nt, synthetic construct
  source 1..19: mol_type = other RNA
ctggaacaaagaactttga

SEQ ID NO: 101 - RNA, 19 nt, synthetic construct
  source 1..19: mol_type = other RNA
tggaacaaagaactttgag

SEQ ID NO: 102 - RNA, 19 nt, synthetic construct
  source 1..19: mol_type = other RNA
ggaacaaagaactttgagg

SEQ ID NO: 103 - RNA, 19 nt, synthetic construct
  source 1..19: mol_type = other RNA
gaacaaagaactttgagga

SEQ ID NO: 104 - RNA, 19 nt, synthetic construct
  source 1..19: mol_type = other RNA
aacaaagaactttgaggaa

SEQ ID NO: 105 - RNA, 19 nt, synthetic construct
  source 1..19: mol_type = other RNA
acaaagaactttgaggaac

SEQ ID NO: 106 - RNA, 19 nt, synthetic construct
  source 1..19: mol_type = other RNA
caaagaactttgaggaact

SEQ ID NO: 107 - RNA, 19 nt, synthetic construct
  source 1..19: mol_type = other RNA
aaagaactttgaggaactt

SEQ ID NO: 108 - RNA, 19 nt, synthetic construct
  source 1..19: mol_type = other RNA
aagaactttgaggaacttg

SEQ ID NO: 109 - RNA, 19 nt, synthetic construct
  source 1..19: mol_type = other RNA
agaactttgaggaacttgc

SEQ ID NO: 110 - RNA, 19 nt, synthetic construct
  source 1..19: mol_type = other RNA
gaactttgaggaacttgcc

SEQ ID NO: 111 - RNA, 19 nt, synthetic construct
  source 1..19: mol_type = other RNA
aactttgaggaacttgccc

SEQ ID NO: 112 - RNA, 19 nt, synthetic construct
  source 1..19: mol_type = other RNA
actttgaggaacttgccca

SEQ ID NO: 113 - RNA, 19 nt, synthetic construct
  source 1..19: mol_type = other RNA
ctttgaggaacttgcccag

SEQ ID NO: 114 - RNA, 19 nt, synthetic construct
  source 1..19: mol_type = other RNA
tttgaggaacttgcccaga

SEQ ID NO: 115 - RNA, 19 nt, synthetic construct
  source 1..19: mol_type = other RNA
ttgaggaacttgcccagag

SEQ ID NO: 116 - RNA, 19 nt, synthetic construct
  source 1..19: mol_type = other RNA
tgaggaacttgcccagagc

SEQ ID NO: 117 - RNA, 19 nt, synthetic construct
  source 1..19: mol_type = other RNA
gaggaacttgcccagagcc

SEQ ID NO: 118 - RNA, 19 nt, synthetic construct
  source 1..19: mol_type = other RNA
aggaacttgcccagagccc

SEQ ID NO: 119 - RNA, 19 nt, synthetic construct
  source 1..19: mol_type = other RNA
ggaacttgcccagagccct

SEQ ID NO: 120 - RNA, 19 nt, synthetic construct
  source 1..19: mol_type = other RNA
gaacttgcccagagccctg

SEQ ID NO: 121 - RNA, 19 nt, synthetic construct
  source 1..19: mol_type = other RNA
aacttgcccagagccctgc

SEQ ID NO: 122 - RNA, 19 nt, synthetic construct
  source 1..19: mol_type = other RNA
acttgcccagagccctgca

SEQ ID NO: 123 - RNA, 19 nt, synthetic construct
  source 1..19: mol_type = other RNA
cttgcccagagccctgcac

SEQ ID NO: 124 - RNA, 19 nt, synthetic construct
  source 1..19: mol_type = other RNA
ttgcccagagccctgcact

SEQ ID NO: 125 - RNA, 19 nt, synthetic construct
  source 1..19: mol_type = other RNA
tgcccagagccctgcactc

SEQ ID NO: 126 - RNA, 19 nt, synthetic construct
  source 1..19: mol_type = other RNA
gcccagagccctgcactca

SEQ ID NO: 127 - RNA, 19 nt, synthetic construct
  source 1..19: mol_type = other RNA
cccagagccctgcactcat

SEQ ID NO: 128 - RNA, 19 nt, synthetic construct
  source 1..19: mol_type = other RNA
ccagagccctgcactcatc

SEQ ID NO: 129 - RNA, 19 nt, synthetic construct
  source 1..19: mol_type = other RNA
cagagccctgcactcatca

SEQ ID NO: 130 - RNA, 19 nt, synthetic construct
  source 1..19: mol_type = other RNA
agagccctgcactcatcag

SEQ ID NO: 131 - RNA, 19 nt, synthetic construct
  source 1..19: mol_type = other RNA
gagccctgcactcatcaga

SEQ ID NO: 132 - RNA, 19 nt, synthetic construct
  source 1..19: mol_type = other RNA
agccctgcactcatcagac

SEQ ID NO: 133 - RNA, 19 nt, synthetic construct
  source 1..19: mol_type = other RNA
gccctgcactcatcagacc

SEQ ID NO: 134 - RNA, 19 nt, synthetic construct
  source 1..19: mol_type = other RNA
ccctgcactcatcagacct

SEQ ID NO: 135 - RNA, 19 nt, synthetic construct
  source 1..19: mol_type = other RNA
cctgcactcatcagacctg

SEQ ID NO: 136 - RNA, 19 nt, synthetic construct
  source 1..19: mol_type = other RNA
ctgcactcatcagacctgc

SEQ ID NO: 137 - RNA, 19 nt, synthetic construct
  source 1..19: mol_type = other RNA
tgcactcatcagacctgca

SEQ ID NO: 138 - RNA, 19 nt, synthetic construct
  source 1..19: mol_type = other RNA
gcactcatcagacctgcag

SEQ ID NO: 139 - RNA, 19 nt, synthetic construct
  source 1..19: mol_type = other RNA
cactcatcagacctgcagc

SEQ ID NO: 140 - RNA, 19 nt, synthetic construct
  source 1..19: mol_type = other RNA
actcatcagacctgcagca

SEQ ID NO: 141 - RNA, 19 nt, synthetic construct
  source 1..19: mol_type = other RNA
ctcatcagacctgcagcag

SEQ ID NO: 142 - RNA, 19 nt, synthetic construct
  source 1..19: mol_type = other RNA
tcatcagacctgcagcaga

SEQ ID NO: 143 - RNA, 19 nt, synthetic construct
  source 1..19: mol_type = other RNA
catcagacctgcagcagac

SEQ ID NO: 144 - RNA, 19 nt, synthetic construct
  source 1..19: mol_type = other RNA
atcagacctgcagcagaca

SEQ ID NO: 145 - RNA, 19 nt, synthetic construct
  source 1..19: mol_type = other RNA
tcagacctgcagcagacat

SEQ ID NO: 146 - RNA, 19 nt, synthetic construct
  source 1..19: mol_type = other RNA
cagacctgcagcagacatt

SEQ ID NO: 147 - RNA, 19 nt, synthetic construct
  source 1..19: mol_type = other RNA
agacctgcagcagacattg

SEQ ID NO: 148 - RNA, 19 nt, synthetic construct
  source 1..19: mol_type = other RNA
gacctgcagcagacattgc

SEQ ID NO: 149 - RNA, 19 nt, synthetic construct
  source 1..19: mol_type = other RNA
acctgcagcagacattgca

SEQ ID NO: 150 - RNA, 19 nt, synthetic construct
  source 1..19: mol_type = other RNA
cctgcagcagacattgcag

SEQ ID NO: 151 - RNA, 19 nt, synthetic construct
  source 1..19: mol_type = other RNA
ctgcagcagacattgcagg

SEQ ID NO: 152 - RNA, 19 nt, synthetic construct
  source 1..19: mol_type = other RNA
tgcagcagacattgcaggc

SEQ ID NO: 153 - RNA, 19 nt, synthetic construct
  source 1..19: mol_type = other RNA
gcagcagacattgcaggcc

SEQ ID NO: 154 - RNA, 19 nt, synthetic construct
  source 1..19: mol_type = other RNA
cagcagacattgcaggcct

SEQ ID NO: 155 - RNA, 19 nt, synthetic construct
  source 1..19: mol_type = other RNA
agcagacattgcaggcctg

SEQ ID NO: 156 - RNA, 19 nt, synthetic construct
  source 1..19: mol_type = other RNA
gcagacattgcaggcctga

SEQ ID NO: 157 - RNA, 19 nt, synthetic construct
  source 1..19: mol_type = other RNA
cagacattgcaggcctgaa

SEQ ID NO: 158 - RNA, 19 nt, synthetic construct
  source 1..19: mol_type = other RNA
agacattgcaggcctgaag

SEQ ID NO: 159 - RNA, 19 nt, synthetic construct
  source 1..19: mol_type = other RNA
gacattgcaggcctgaaga

SEQ ID NO: 160 - RNA, 19 nt, synthetic construct
  source 1..19: mol_type = other RNA
acattgcaggcctgaagaa

SEQ ID NO: 161 - RNA, 19 nt, synthetic construct
  source 1..19: mol_type = other RNA
cattgcaggcctgaagaaa

SEQ ID NO: 162 - RNA, 19 nt, synthetic construct
  source 1..19: mol_type = other RNA
attgcaggcctgaagaaag

SEQ ID NO: 163 - RNA, 19 nt, synthetic construct
  source 1..19: mol_type = other RNA
ttgcaggcctgaagaaagc

SEQ ID NO: 164 - RNA, 19 nt, synthetic construct
  source 1..19: mol_type = other RNA
tgcaggcctgaagaaagca

SEQ ID NO: 165 - RNA, 19 nt, synthetic construct
  source 1..19: mol_type = other RNA
gcaggcctgaagaaagcac

SEQ ID NO: 166 - RNA, 19 nt, synthetic construct
  source 1..19: mol_type = other RNA
caggcctgaagaaagcacc

SEQ ID NO: 167 - RNA, 19 nt, synthetic construct
  source 1..19: mol_type = other RNA
aggcctgaagaaagcacct

SEQ ID NO: 168 - RNA, 19 nt, synthetic construct
  source 1..19: mol_type = other RNA
ggcctgaagaaagcacctt

SEQ ID NO: 169 - RNA, 19 nt, synthetic construct
  source 1..19: mol_type = other RNA
gcctgaagaaagcaccttt

SEQ ID NO: 170 - RNA, 19 nt, synthetic construct
  source 1..19: mol_type = other RNA
cctgaagaaagcacctttt

SEQ ID NO: 171 - RNA, 19 nt, synthetic construct
  source 1..19: mol_type = other RNA
ctgaagaaagcaccttttc

SEQ ID NO: 172 - RNA, 19 nt, synthetic construct
  source 1..19: mol_type = other RNA
tgaagaaagcaccttttct

SEQ ID NO: 173 - RNA, 19 nt, synthetic construct
  source 1..19: mol_type = other RNA
gaagaaagcaccttttctg

SEQ ID NO: 174 - RNA, 19 nt, synthetic construct
  source 1..19: mol_type = other RNA
aagaaagcaccttttctgc

SEQ ID NO: 175 - RNA, 19 nt, synthetic construct
  source 1..19: mol_type = other RNA
agaaagcaccttttctgct

SEQ ID NO: 176 - RNA, 19 nt, synthetic construct
  source 1..19: mol_type = other RNA
gaaagcaccttttctgctg

SEQ ID NO: 177 - RNA, 19 nt, synthetic construct
  source 1..19: mol_type = other RNA
aaagcaccttttctgctgc

SEQ ID NO: 178 - RNA, 19 nt, synthetic construct
  source 1..19: mol_type = other RNA
aagcaccttttctgctgcc

SEQ ID NO: 179 - RNA, 19 nt, synthetic construct
  source 1..19: mol_type = other RNA
agcaccttttctgctgcca

SEQ ID NO: 180 - RNA, 19 nt, synthetic construct
  source 1..19: mol_type = other RNA
gcaccttttctgctgccat

SEQ ID NO: 181 - RNA, 19 nt, synthetic construct
  source 1..19: mol_type = other RNA
caccttttctgctgccatg

SEQ ID NO: 182 - RNA, 19 nt, synthetic construct
  source 1..19: mol_type = other RNA
accttttctgctgccatga

SEQ ID NO: 183 - RNA, 19 nt, synthetic construct
  source 1..19: mol_type = other RNA
ccttttctgctgccatgac

SEQ ID NO: 184 - RNA, 19 nt, synthetic construct
  source 1..19: mol_type = other RNA
cttttctgctgccatgaca

SEQ ID NO: 185 - RNA, 19 nt, synthetic construct
  source 1..19: mol_type = other RNA
ttttctgctgccatgacaa

SEQ ID NO: 186 - RNA, 19 nt, synthetic construct
  source 1..19: mol_type = other RNA
tttctgctgccatgacaac

SEQ ID NO: 187 - RNA, 19 nt, synthetic construct
  source 1..19: mol_type = other RNA
ttctgctgccatgacaacc

SEQ ID NO: 188 - RNA, 19 nt, synthetic construct
  source 1..19: mol_type = other RNA
tctgctgccatgacaacca

SEQ ID NO: 189 - RNA, 19 nt, synthetic construct
  source 1..19: mol_type = other RNA
ctgctgccatgacaaccat

SEQ ID NO: 190 - RNA, 19 nt, synthetic construct
  source 1..19: mol_type = other RNA
tgctgccatgacaaccatg

SEQ ID NO: 191 - RNA, 19 nt, synthetic construct
  source 1..19: mol_type = other RNA
gctgccatgacaaccatgc

SEQ ID NO: 192 - RNA, 19 nt, synthetic construct
  source 1..19: mol_type = other RNA
ctgccatgacaaccatgca

SEQ ID NO: 193 - RNA, 19 nt, synthetic construct
  source 1..19: mol_type = other RNA
tgccatgacaaccatgcaa

SEQ ID NO: 194 - RNA, 19 nt, synthetic construct
  source 1..19: mol_type = other RNA
gccatgacaaccatgcaag

SEQ ID NO: 195 - RNA, 19 nt, synthetic construct
  source 1..19: mol_type = other RNA
ccatgacaaccatgcaagg

SEQ ID NO: 196 - RNA, 19 nt, synthetic construct
  source 1..19: mol_type = other RNA
catgacaaccatgcaagga

SEQ ID NO: 197 - RNA, 19 nt, synthetic construct
  source 1..19: mol_type = other RNA
atgacaaccatgcaaggaa

SEQ ID NO: 198 - RNA, 19 nt, synthetic construct
  source 1..19: mol_type = other RNA
tgacaaccatgcaaggaat

SEQ ID NO: 199 - RNA, 19 nt, synthetic construct
  source 1..19: mol_type = other RNA
gacaaccatgcaaggaatg

SEQ ID NO: 200 - RNA, 19 nt, synthetic construct
  source 1..19: mol_type = other RNA
acaaccatgcaaggaatgg

SEQ ID NO: 201 - RNA, 19 nt, synthetic construct
  source 1..19: mol_type = other RNA
caaccatgcaaggaatgga

SEQ ID NO: 202 - RNA, 19 nt, synthetic construct
  source 1..19: mol_type = other RNA
aaccatgcaaggaatggaa

SEQ ID NO: 203 - RNA, 19 nt, synthetic construct
  source 1..19: mol_type = other RNA
accatgcaaggaatggaac

SEQ ID NO: 204 - RNA, 19 nt, synthetic construct
  source 1..19: mol_type = other RNA
ccatgcaaggaatggaaca

SEQ ID NO: 205 - RNA, 19 nt, synthetic construct
  source 1..19: mol_type = other RNA
catgcaaggaatggaacag

SEQ ID NO: 206 - RNA, 19 nt, synthetic construct
  source 1..19: mol_type = other RNA
atgcaaggaatggaacaga

SEQ ID NO: 207 - RNA, 19 nt, synthetic construct
  source 1..19: mol_type = other RNA
tgcaaggaatggaacagac

SEQ ID NO: 208 - RNA, 19 nt, synthetic construct
  source 1..19: mol_type = other RNA
gcaaggaatggaacagacc

SEQ ID NO: 209 - RNA, 19 nt, synthetic construct
  source 1..19: mol_type = other RNA
caaggaatggaacagacca

SEQ ID NO: 210 - RNA, 19 nt, synthetic construct
  source 1..19: mol_type = other RNA
aaggaatggaacagaccac

SEQ ID NO: 211 - RNA, 19 nt, synthetic construct
  source 1..19: mol_type = other RNA
aggaatggaacagaccact

SEQ ID NO: 212 - RNA, 19 nt, synthetic construct
  source 1..19: mol_type = other RNA
ggaatggaacagaccactc

SEQ ID NO: 213 - RNA, 19 nt, synthetic construct
  source 1..19: mol_type = other RNA
gaatggaacagaccactcc

SEQ ID NO: 214 - RNA, 19 nt, synthetic construct
  source 1..19: mol_type = other RNA
aatggaacagaccactcca

SEQ ID NO: 215 - RNA, 19 nt, synthetic construct
  source 1..19: mol_type = other RNA
atggaacagaccactccag

SEQ ID NO: 216 - RNA, 19 nt, synthetic construct
  source 1..19: mol_type = other RNA
tggaacagaccactccagg

SEQ ID NO: 217 - RNA, 19 nt, synthetic construct
  source 1..19: mol_type = other RNA
ggaacagaccactccaggg

SEQ ID NO: 218 - RNA, 19 nt, synthetic construct
  source 1..19: mol_type = other RNA
gaacagaccactccagggg

SEQ ID NO: 219 - RNA, 19 nt, synthetic construct
  source 1..19: mol_type = other RNA
aacagaccactccaggggc

SEQ ID NO: 220 - RNA, 19 nt, synthetic construct
  source 1..19: mol_type = other RNA
acagaccactccaggggct

SEQ ID NO: 221 - RNA, 19 nt, synthetic construct
  source 1..19: mol_type = other RNA
cagaccactccaggggctg

SEQ ID NO: 222 - RNA, 19 nt, synthetic construct
  source 1..19: mol_type = other RNA
agaccactccaggggctgg

SEQ ID NO: 223 - RNA, 19 nt, synthetic construct
  source 1..19: mol_type = other RNA
gaccactccaggggctggc

SEQ ID NO: 224 - RNA, 19 nt, synthetic construct
  source 1..19: mol_type = other RNA
accactccaggggctggcc

SEQ ID NO: 225 - RNA, 19 nt, synthetic construct
  source 1..19: mol_type = other RNA
ccactccaggggctggccc

SEQ ID NO: 226 - RNA, 19 nt, synthetic construct
  source 1..19: mol_type = other RNA
cactccaggggctggccct

SEQ ID NO: 227 - RNA, 19 nt, synthetic construct
  source 1..19: mol_type = other RNA
actccaggggctggccctg

SEQ ID NO: 228 - RNA, 19 nt, synthetic construct
  source 1..19: mol_type = other RNA
ctccaggggctggccctga

SEQ ID NO: 229 - RNA, 19 nt, synthetic construct
  source 1..19: mol_type = other RNA
tccaggggctggccctgat

SEQ ID NO: 230 - RNA, 19 nt, synthetic construct
  source 1..19: mol_type = other RNA
ccaggggctggccctgatg

SEQ ID NO: 231 - RNA, 19 nt, synthetic construct
  source 1..19: mol_type = other RNA
caggggctggccctgatgt

SEQ ID NO: 232 - RNA, 19 nt, synthetic construct
  source 1..19: mol_type = other RNA
aggggctggccctgatgtg

SEQ ID NO: 233 - RNA, 19 nt, synthetic construct
  source 1..19: mol_type = other RNA
ggggctggccctgatgtgc

SEQ ID NO: 234 - RNA, 19 nt, synthetic construct
  source 1..19: mol_type = other RNA
gggctggccctgatgtgcc

SEQ ID NO: 235 - RNA, 19 nt, synthetic construct
  source 1..19: mol_type = other RNA
ggctggccctgatgtgccc

SEQ ID NO: 236 - RNA, 19 nt, synthetic construct
  source 1..19: mol_type = other RNA
gctggccctgatgtgcccc

SEQ ID NO: 237 - RNA, 19 nt, synthetic construct
  source 1..19: mol_type = other RNA
ctggccctgatgtgcccca

SEQ ID NO: 238 - RNA, 19 nt, synthetic construct
  source 1..19: mol_type = other RNA
tggccctgatgtgccccag

SEQ ID NO: 239 - RNA, 19 nt, synthetic construct
  source 1..19: mol_type = other RNA
ggccctgatgtgccccagc

SEQ ID NO: 240 - RNA, 19 nt, synthetic construct
  source 1..19: mol_type = other RNA
gccctgatgtgccccagct

SEQ ID NO: 241 - RNA, 19 nt, synthetic construct
  source 1..19: mol_type = other RNA
ccctgatgtgccccagctg

SEQ ID NO: 242 - RNA, 19 nt, synthetic construct
  source 1..19: mol_type = other RNA
cctgatgtgccccagctgg

SEQ ID NO: 243 - RNA, 19 nt, synthetic construct
  source 1..19: mol_type = other RNA
ctgatgtgccccagctggg

SEQ ID NO: 244 - RNA, 19 nt, synthetic construct
  source 1..19: mol_type = other RNA
tgatgtgccccagctggga

SEQ ID NO: 245 - RNA, 19 nt, synthetic construct
  source 1..19: mol_type = other RNA
gatgtgccccagctgggaa

SEQ ID NO: 246 - RNA, 19 nt, synthetic construct
  source 1..19: mol_type = other RNA
atgtgccccagctgggaaa

SEQ ID NO: 247 - RNA, 19 nt, synthetic construct
  source 1..19: mol_type = other RNA
tgtgccccagctgggaaac

SEQ ID NO: 248 - RNA, 19 nt, synthetic construct
  source 1..19: mol_type = other RNA
gtgccccagctgggaaaca

SEQ ID NO: 249 - RNA, 19 nt, synthetic construct
  source 1..19: mol_type = other RNA
tgccccagctgggaaacat

SEQ ID NO: 250 - RNA, 19 nt, synthetic construct
  source 1..19: mol_type = other RNA
gccccagctgggaaacata

SEQ ID NO: 251 - RNA, 19 nt, synthetic construct
  source 1..19: mol_type = other RNA
ccccagctgggaaacatag

SEQ ID NO: 252 - RNA, 19 nt, synthetic construct
  source 1..19: mol_type = other RNA
cccagctgggaaacataga

SEQ ID NO: 253 - RNA, 19 nt, synthetic construct
  source 1..19: mol_type = other RNA
ccagctgggaaacatagat

SEQ ID NO: 254 - RNA, 19 nt, synthetic construct
  source 1..19: mol_type = other RNA
cagctgggaaacatagatg

SEQ ID NO: 255 - RNA, 19 nt, synthetic construct
  source 1..19: mol_type = other RNA
agctgggaaacatagatgt

SEQ ID NO: 256 - RNA, 19 nt, synthetic construct
  source 1..19: mol_type = other RNA
gctgggaaacatagatgtc

SEQ ID NO: 257 - RNA, 19 nt, synthetic construct
  source 1..19: mol_type = other RNA
ctgggaaacatagatgtca

SEQ ID NO: 258 - RNA, 19 nt, synthetic construct
  source 1..19: mol_type = other RNA
tgggaaacatagatgtcat

SEQ ID NO: 259 - RNA, 19 nt, synthetic construct
  source 1..19: mol_type = other RNA
gggaaacatagatgtcata

SEQ ID NO: 260 - RNA, 19 nt, synthetic construct
  source 1..19: mol_type = other RNA
ggaaacatagatgtcatac

SEQ ID NO: 261 - RNA, 19 nt, synthetic construct
  source 1..19: mol_type = other RNA
gaaacatagatgtcataca

SEQ ID NO: 262 - RNA, 19 nt, synthetic construct
  source 1..19: mol_type = other RNA
aaacatagatgtcatacat

SEQ ID NO: 263 - RNA, 19 nt, synthetic construct
  source 1..19: mol_type = other RNA
aacatagatgtcatacatt

SEQ ID NO: 264 - RNA, 19 nt, synthetic construct
  source 1..19: mol_type = other RNA
acatagatgtcatacattc

SEQ ID NO: 265 - RNA, 19 nt, synthetic construct
  source 1..19: mol_type = other RNA
catagatgtcatacattca

SEQ ID NO: 266 - RNA, 19 nt, synthetic construct
  source 1..19: mol_type = other RNA
atagatgtcatacattcat

SEQ ID NO: 267 - RNA, 19 nt, synthetic construct
  source 1..19: mol_type = other RNA
tagatgtcatacattcata

SEQ ID NO: 268 - RNA, 19 nt, synthetic construct
  source 1..19: mol_type = other RNA
agatgtcatacattcatat

SEQ ID NO: 269 - RNA, 19 nt, synthetic construct
  source 1..19: mol_type = other RNA
gatgtcatacattcatatc

SEQ ID NO: 270 - RNA, 19 nt, synthetic construct
  source 1..19: mol_type = other RNA
atgtcatacattcatatct

SEQ ID NO: 271 - RNA, 19 nt, synthetic construct
  source 1..19: mol_type = other RNA
tgtcatacattcatatctg

SEQ ID NO: 272 - RNA, 19 nt, synthetic construct
  source 1..19: mol_type = other RNA
gtcatacattcatatctgt

SEQ ID NO: 273 - RNA, 19 nt, synthetic construct
  source 1..19: mol_type = other RNA
tcatacattcatatctgtg

SEQ ID NO: 274 - RNA, 19 nt, synthetic construct
  source 1..19: mol_type = other RNA
catacattcatatctgtgt

SEQ ID NO: 275 - RNA, 19 nt, synthetic construct
  source 1..19: mol_type = other RNA
atacattcatatctgtgta

SEQ ID NO: 276 - RNA, 19 nt, synthetic construct
  source 1..19: mol_type = other RNA
tacattcatatctgtgtaa

SEQ ID NO: 277 - RNA, 19 nt, synthetic construct
  source 1..19: mol_type = other RNA
acattcatatctgtgtaaa

SEQ ID NO: 278 - RNA, 19 nt, synthetic construct
  source 1..19: mol_type = other RNA
cattcatatctgtgtaaag

SEQ ID NO: 279 - RNA, 19 nt, synthetic construct
  source 1..19: mol_type = other RNA
attcatatctgtgtaaagg

SEQ ID NO: 280 - RNA, 19 nt, synthetic construct
  source 1..19: mol_type = other RNA
ttcatatctgtgtaaagga

SEQ ID NO: 281 - RNA, 19 nt, synthetic construct
  source 1..19: mol_type = other RNA
tcatatctgtgtaaaggat

SEQ ID NO: 282 - RNA, 19 nt, synthetic construct
  source 1..19: mol_type = other RNA
catatctgtgtaaaggatt

SEQ ID NO: 283 - RNA, 19 nt, synthetic construct
  source 1..19: mol_type = other RNA
atatctgtgtaaaggattg

SEQ ID NO: 284 - RNA, 19 nt, synthetic construct
  source 1..19: mol_type = other RNA
tatctgtgtaaaggattgc

SEQ ID NO: 285 - RNA, 19 nt, synthetic construct
  source 1..19: mol_type = other RNA
atctgtgtaaaggattgca

SEQ ID NO: 286 - RNA, 19 nt, synthetic construct
  source 1..19: mol_type = other RNA
tctgtgtaaaggattgcaa

SEQ ID NO: 287 - RNA, 19 nt, synthetic construct
  source 1..19: mol_type = other RNA
ctgtgtaaaggattgcaag

SEQ ID NO: 288 - RNA, 19 nt, synthetic construct
  source 1..19: mol_type = other RNA
tgtgtaaaggattgcaaga

SEQ ID NO: 289 - RNA, 19 nt, synthetic construct
  source 1..19: mol_type = other RNA
gtgtaaaggattgcaagag

SEQ ID NO: 290 - RNA, 19 nt, synthetic construct
  source 1..19: mol_type = other RNA
tgtaaaggattgcaagaga

SEQ ID NO: 291 - RNA, 19 nt, synthetic construct
  source 1..19: mol_type = other RNA
gtaaaggattgcaagagaa

SEQ ID NO: 292 - RNA, 19 nt, synthetic construct
  source 1..19: mol_type = other RNA
taaaggattgcaagagaag

SEQ ID NO: 293 - RNA, 19 nt, synthetic construct
  source 1..19: mol_type = other RNA
aaaggattgcaagagaagt

SEQ ID NO: 294 - RNA, 19 nt, synthetic construct
  source 1..19: mol_type = other RNA
aaggattgcaagagaagtt

SEQ ID NO: 295 - RNA, 19 nt, synthetic construct
  source 1..19: mol_type = other RNA
aggattgcaagagaagttc

SEQ ID NO: 296 - RNA, 19 nt, synthetic construct
  source 1..19: mol_type = other RNA
ggattgcaagagaagttct

SEQ ID NO: 297 - RNA, 19 nt, synthetic construct
  source 1..19: mol_type = other RNA
gattgcaagagaagttctt

SEQ ID NO: 298 - RNA, 19 nt, synthetic construct
  source 1..19: mol_type = other RNA
attgcaagagaagttcttc

SEQ ID NO: 299 - RNA, 19 nt, synthetic construct
  source 1..19: mol_type = other RNA
ttgcaagagaagttcttca

SEQ ID NO: 300 - RNA, 19 nt, synthetic construct
  source 1..19: mol_type = other RNA
tgcaagagaagttcttcaa

SEQ ID NO: 301 - RNA, 19 nt, synthetic construct
  source 1..19: mol_type = other RNA
gcaagagaagttcttcaag

SEQ ID NO: 302 - RNA, 19 nt, synthetic construct
  source 1..19: mol_type = other RNA
caagagaagttcttcaaga

SEQ ID NO: 303 - RNA, 19 nt, synthetic construct
  source 1..19: mol_type = other RNA
aagagaagttcttcaagag

SEQ ID NO: 304 - RNA, 19 nt, synthetic construct
  source 1..19: mol_type = other RNA
agagaagttcttcaagagg

SEQ ID NO: 305 - RNA, 19 nt, synthetic construct
  source 1..19: mol_type = other RNA
gagaagttcttcaagagga

SEQ ID NO: 306 - RNA, 19 nt, synthetic construct
  source 1..19: mol_type = other RNA
agaagttcttcaagaggaa

SEQ ID NO: 307 - RNA, 19 nt, synthetic construct
  source 1..19: mol_type = other RNA
gaagttcttcaagaggaaa

SEQ ID NO: 308 - RNA, 19 nt, synthetic construct
  source 1..19: mol_type = other RNA
aagttcttcaagaggaaac

SEQ ID NO: 309 - RNA, 19 nt, synthetic construct
  source 1..19: mol_type = other RNA
agttcttcaagaggaaacc

SEQ ID NO: 310 - RNA, 19 nt, synthetic construct
  source 1..19: mol_type = other RNA
gttcttcaagaggaaaccc

SEQ ID NO: 311 - RNA, 19 nt, synthetic construct
  source 1..19: mol_type = other RNA
ttcttcaagaggaaaccca

SEQ ID NO: 312 - RNA, 19 nt, synthetic construct
  source 1..19: mol_type = other RNA
tcttcaagaggaaacccaa

SEQ ID NO: 313 - RNA, 19 nt, synthetic construct
  source 1..19: mol_type = other RNA
cttcaagaggaaacccaaa

SEQ ID NO: 314 - RNA, 19 nt, synthetic construct
  source 1..19: mol_type = other RNA
ttcaagaggaaacccaaag

SEQ ID NO: 315 - RNA, 19 nt, synthetic construct
  source 1..19: mol_type = other RNA
tcaagaggaaacccaaagt

SEQ ID NO: 316 - RNA, 19 nt, synthetic construct
  source 1..19: mol_type = other RNA
caagaggaaacccaaagtc

SEQ ID NO: 317 - RNA, 19 nt, synthetic construct
  source 1..19: mol_type = other RNA
aagaggaaacccaaagtcc

SEQ ID NO: 318 - RNA, 19 nt, synthetic construct
  source 1..19: mol_type = other RNA
agaggaaacccaaagtcct

SEQ ID NO: 319 - RNA, 19 nt, synthetic construct
  source 1..19: mol_type = other RNA
gaggaaacccaaagtcctt

SEQ ID NO: 320 - RNA, 19 nt, synthetic construct
  source 1..19: mol_type = other RNA
aggaaacccaaagtccttg

SEQ ID NO: 321 - RNA, 19 nt, synthetic construct
  source 1..19: mol_type = other RNA
ggaaacccaaagtccttgg

SEQ ID NO: 322 - RNA, 19 nt, synthetic construct
  source 1..19: mol_type = other RNA
gaaacccaaagtccttggg

SEQ ID NO: 323 - RNA, 19 nt, synthetic construct
  source 1..19: mol_type = other RNA
aaacccaaagtccttgggg

SEQ ID NO: 324 - RNA, 19 nt, synthetic construct
  source 1..19: mol_type = other RNA
aacccaaagtccttggggt

SEQ ID NO: 325 - RNA, 19 nt, synthetic construct
  source 1..19: mol_type = other RNA
acccaaagtccttggggtt

SEQ ID NO: 326 - RNA, 19 nt, synthetic construct
  source 1..19: mol_type = other RNA
cccaaagtccttggggttt

SEQ ID NO: 327 - RNA, 19 nt, synthetic construct
  source 1..19: mol_type = other RNA
ccaaagtccttggggtttt

SEQ ID NO: 328 - RNA, 19 nt, synthetic construct
  source 1..19: mol_type = other RNA
caaagtccttggggttttg

SEQ ID NO: 329 - RNA, 19 nt, synthetic construct
  source 1..19: mol_type = other RNA
aaagtccttggggttttgt

SEQ ID NO: 330 - RNA, 19 nt, synthetic construct
  source 1..19: mol_type = other RNA
aagtccttggggttttgtg

SEQ ID NO: 331 - RNA, 19 nt, synthetic construct
  source 1..19: mol_type = other RNA
agtccttggggttttgtgt

SEQ ID NO: 332 - RNA, 19 nt, synthetic construct
  source 1..19: mol_type = other RNA
gtccttggggttttgtgtg

SEQ ID NO: 333 - RNA, 19 nt, synthetic construct
  source 1..19: mol_type = other RNA
tccttggggttttgtgtgg

SEQ ID NO: 334 - RNA, 19 nt, synthetic construct
  source 1..19: mol_type = other RNA
ccttggggttttgtgtgga

SEQ ID NO: 335 - RNA, 19 nt, synthetic construct
  source 1..19: mol_type = other RNA
cttggggttttgtgtggac

SEQ ID NO: 336 - RNA, 19 nt, synthetic construct
  source 1..19: mol_type = other RNA
ttggggttttgtgtggaca

SEQ ID NO: 337 - RNA, 19 nt, synthetic construct
  source 1..19: mol_type = other RNA
tggggttttgtgtggacat

SEQ ID NO: 338 - RNA, 19 nt, synthetic construct
  source 1..19: mol_type = other RNA
ggggttttgtgtggacata

SEQ ID NO: 339 - RNA, 19 nt, synthetic construct
  source 1..19: mol_type = other RNA
gggttttgtgtggacataa

SEQ ID NO: 340 - RNA, 19 nt, synthetic construct
  source 1..19: mol_type = other RNA
ggttttgtgtggacataag

SEQ ID NO: 341 - RNA, 19 nt, synthetic construct
  source 1..19: mol_type = other RNA
gttttgtgtggacataagt

SEQ ID NO: 342 - RNA, 19 nt, synthetic construct
  source 1..19: mol_type = other RNA
ttttgtgtggacataagtt

SEQ ID NO: 343 - RNA, 19 nt, synthetic construct
  source 1..19: mol_type = other RNA
tttgtgtggacataagttt

SEQ ID NO: 344 - RNA, 19 nt, synthetic construct
  source 1..19: mol_type = other RNA
ttgtgtggacataagtttt

SEQ ID NO: 345 - RNA, 19 nt, synthetic construct
  source 1..19: mol_type = other RNA
tgtgtggacataagttttc

SEQ ID NO: 346 - RNA, 19 nt, synthetic construct
  source 1..19: mol_type = other RNA
gtgtggacataagttttca

SEQ ID NO: 347 - RNA, 19 nt, synthetic construct
  source 1..19: mol_type = other RNA
tgtggacataagttttcaa

SEQ ID NO: 348 - RNA, 19 nt, synthetic construct
  source 1..19: mol_type = other RNA
gtggacataagttttcaac

SEQ ID NO: 349 - RNA, 19 nt, synthetic construct
  source 1..19: mol_type = other RNA
tggacataagttttcaact

SEQ ID NO: 350 - RNA, 19 nt, synthetic construct
  source 1..19: mol_type = other RNA
ggacataagttttcaactc

SEQ ID NO: 351 - RNA, 19 nt, synthetic construct
  source 1..19: mol_type = other RNA
gacataagttttcaactca

SEQ ID NO: 352 - RNA, 19 nt, synthetic construct
  source 1..19: mol_type = other RNA
acataagttttcaactcat

SEQ ID NO: 353 - RNA, 19 nt, synthetic construct
  source 1..19: mol_type = other RNA
cataagttttcaactcatt

SEQ ID NO: 354 - RNA, 19 nt, synthetic construct
  source 1..19: mol_type = other RNA
ataagttttcaactcattc

SEQ ID NO: 355 - RNA, 19 nt, synthetic construct
  source 1..19: mol_type = other RNA
taagttttcaactcattcg

SEQ ID NO: 356 - RNA, 19 nt, synthetic construct
  source 1..19: mol_type = other RNA
aagttttcaactcattcgg

SEQ ID NO: 357 - RNA, 19 nt, synthetic construct
  source 1..19: mol_type = other RNA
agttttcaactcattcggt

SEQ ID NO: 358 - RNA, 19 nt, synthetic construct
  source 1..19: mol_type = other RNA
gttttcaactcattcggta

SEQ ID NO: 359 - RNA, 19 nt, synthetic construct
  source 1..19: mol_type = other RNA
ttttcaactcattcggtat

SEQ ID NO: 360 - RNA, 19 nt, synthetic construct
  source 1..19: mol_type = other RNA
tttcaactcattcggtatc

SEQ ID NO: 361 - RNA, 19 nt, synthetic construct
  source 1..19: mol_type = other RNA
ttcaactcattcggtatcc

SEQ ID NO: 362 - RNA, 19 nt, synthetic construct
  source 1..19: mol_type = other RNA
tcaactcattcggtatcct

SEQ ID NO: 363 - RNA, 19 nt, synthetic construct
  source 1..19: mol_type = other RNA
caactcattcggtatcctt

SEQ ID NO: 364 - RNA, 19 nt, synthetic construct
  source 1..19: mol_type = other RNA
aactcattcggtatcctta

SEQ ID NO: 365 - RNA, 19 nt, synthetic construct
  source 1..19: mol_type = other RNA
actcattcggtatccttat

SEQ ID NO: 366 - RNA, 19 nt, synthetic construct
  source 1..19: mol_type = other RNA
ctcattcggtatccttatc

SEQ ID NO: 367 - RNA, 19 nt, synthetic construct
  source 1..19: mol_type = other RNA
tcattcggtatccttatca

SEQ ID NO: 368 - RNA, 19 nt, synthetic construct
  source 1..19: mol_type = other RNA
cattcggtatccttatcag

SEQ ID NO: 369 - RNA, 19 nt, synthetic construct
  source 1..19: mol_type = other RNA
attcggtatccttatcagt

SEQ ID NO: 370 - RNA, 19 nt, synthetic construct
  source 1..19: mol_type = other RNA
ttcggtatccttatcagtt

SEQ ID NO: 371 - RNA, 19 nt, synthetic construct
  source 1..19: mol_type = other RNA
tcggtatccttatcagttg

SEQ ID NO: 372 - RNA, 19 nt, synthetic construct
  source 1..19: mol_type = other RNA
cggtatccttatcagttgc

SEQ ID NO: 373 - RNA, 19 nt, synthetic construct
  source 1..19: mol_type = other RNA
ggtatccttatcagttgca

SEQ ID NO: 374 - RNA, 19 nt, synthetic construct
  source 1..19: mol_type = other RNA
gtatccttatcagttgcag

SEQ ID NO: 375 - RNA, 19 nt, synthetic construct
  source 1..19: mol_type = other RNA
tatccttatcagttgcagc

SEQ ID NO: 376 - RNA, 19 nt, synthetic construct
  source 1..19: mol_type = other RNA
atccttatcagttgcagca

SEQ ID NO: 377 - RNA, 19 nt, synthetic construct
  source 1..19: mol_type = other RNA
tccttatcagttgcagcag

SEQ ID NO: 378 - RNA, 19 nt, synthetic construct
  source 1..19: mol_type = other RNA
ccttatcagttgcagcagg

SEQ ID NO: 379 - RNA, 19 nt, synthetic construct
  source 1..19: mol_type = other RNA
cttatcagttgcagcagga

SEQ ID NO: 380 - RNA, 19 nt, synthetic construct
  source 1..19: mol_type = other RNA
ttatcagttgcagcaggaa

SEQ ID NO: 381 - RNA, 19 nt, synthetic construct
  source 1..19: mol_type = other RNA
tatcagttgcagcaggaat

SEQ ID NO: 382 - RNA, 19 nt, synthetic construct
  source 1..19: mol_type = other RNA
atcagttgcagcaggaatt

SEQ ID NO: 383 - RNA, 19 nt, synthetic construct
  source 1..19: mol_type = other RNA
tcagttgcagcaggaatta

SEQ ID NO: 384 - RNA, 19 nt, synthetic construct
  source 1..19: mol_type = other RNA
cagttgcagcaggaattag

SEQ ID NO: 385 - RNA, 19 nt, synthetic construct
  source 1..19: mol_type = other RNA
agttgcagcaggaattaga

SEQ ID NO: 386 - RNA, 19 nt, synthetic construct
  source 1..19: mol_type = other RNA
gttgcagcaggaattagaa

SEQ ID NO: 387 - RNA, 19 nt, synthetic construct
  source 1..19: mol_type = other RNA
ttgcagcaggaattagaac

SEQ ID NO: 388 - RNA, 19 nt, synthetic construct
  source 1..19: mol_type = other RNA
tgcagcaggaattagaaca

SEQ ID NO: 389 - RNA, 19 nt, synthetic construct
  source 1..19: mol_type = other RNA
gcagcaggaattagaacaa

SEQ ID NO: 390 - RNA, 19 nt, synthetic construct
  source 1..19: mol_type = other RNA
cagcaggaattagaacaac

SEQ ID NO: 391 - RNA, 19 nt, synthetic construct
  source 1..19: mol_type = other RNA
agcaggaattagaacaaca

SEQ ID NO: 392 - RNA, 19 nt, synthetic construct
  source 1..19: mol_type = other RNA
gcaggaattagaacaacaa

SEQ ID NO: 393 - RNA, 19 nt, synthetic construct
  source 1..19: mol_type = other RNA
caggaattagaacaacaaa

SEQ ID NO: 394 - RNA, 19 nt, synthetic construct
  source 1..19: mol_type = other RNA
aggaattagaacaacaaaa

SEQ ID NO: 395 - RNA, 19 nt, synthetic construct
  source 1..19: mol_type = other RNA
ggaattagaacaacaaaag

SEQ ID NO: 396 - RNA, 19 nt, synthetic construct
  source 1..19: mol_type = other RNA
gaattagaacaacaaaagg

SEQ ID NO: 397 - RNA, 19 nt, synthetic construct
  source 1..19: mol_type = other RNA
aattagaacaacaaaaggt

SEQ ID NO: 398 - RNA, 19 nt, synthetic construct
  source 1..19: mol_type = other RNA
attagaacaacaaaaggtc

SEQ ID NO: 399 - RNA, 19 nt, synthetic construct
  source 1..19: mol_type = other RNA
ttagaacaacaaaaggtct

SEQ ID NO: 400 - RNA, 19 nt, synthetic construct
  source 1..19: mol_type = other RNA
tagaacaacaaaaggtctg

SEQ ID NO: 401 - RNA, 19 nt, synthetic construct
  source 1..19: mol_type = other RNA
agaacaacaaaaggtctgg

SEQ ID NO: 402 - RNA, 19 nt, synthetic construct
  source 1..19: mol_type = other RNA
gaacaacaaaaggtctggt

SEQ ID NO: 403 - RNA, 19 nt, synthetic construct
  source 1..19: mol_type = other RNA
aacaacaaaaggtctggtt

SEQ ID NO: 404 - RNA, 19 nt, synthetic construct
  source 1..19: mol_type = other RNA
acaacaaaaggtctggttg

SEQ ID NO: 405 - RNA, 19 nt, synthetic construct
  source 1..19: mol_type = other RNA
caacaaaaggtctggttgg

SEQ ID NO: 406 - RNA, 19 nt, synthetic construct
  source 1..19: mol_type = other RNA
aacaaaaggtctggttgga

SEQ ID NO: 407 - RNA, 19 nt, synthetic construct
  source 1..19: mol_type = other RNA
acaaaaggtctggttggag

SEQ ID NO: 408 - RNA, 19 nt, synthetic construct
  source 1..19: mol_type = other RNA
caaaaggtctggttggagg

SEQ ID NO: 409 - RNA, 19 nt, synthetic construct
  source 1..19: mol_type = other RNA
aaaaggtctggttggaggt

SEQ ID NO: 410 - RNA, 19 nt, synthetic construct
  source 1..19: mol_type = other RNA
aaaggtctggttggaggta

SEQ ID NO: 411 - RNA, 19 nt, synthetic construct
  source 1..19: mol_type = other RNA
aaggtctggttggaggtag

SEQ ID NO: 412 - RNA, 19 nt, synthetic construct
  source 1..19: mol_type = other RNA
aggtctggttggaggtagt

SEQ ID NO: 413 - RNA, 19 nt, synthetic construct
  source 1..19: mol_type = other RNA
ggtctggttggaggtagtc

SEQ ID NO: 414 - RNA, 19 nt, synthetic construct
  source 1..19: mol_type = other RNA
gtctggttggaggtagtct

SEQ ID NO: 415 - RNA, 19 nt, synthetic construct
  source 1..19: mol_type = other RNA
tctggttggaggtagtcta

SEQ ID NO: 416 - RNA, 19 nt, synthetic construct
  source 1..19: mol_type = other RNA
ctggttggaggtagtctag

SEQ ID NO: 417 - RNA, 19 nt, synthetic construct
  source 1..19: mol_type = other RNA
tggttggaggtagtctagg

SEQ ID NO: 418 - RNA, 19 nt, synthetic construct
  source 1..19: mol_type = other RNA
ggttggaggtagtctagga

SEQ ID NO: 419 - RNA, 19 nt, synthetic construct
  source 1..19: mol_type = other RNA
gttggaggtagtctaggaa

SEQ ID NO: 420 - RNA, 19 nt, synthetic construct
  source 1..19: mol_type = other RNA
ttggaggtagtctaggaaa

SEQ ID NO: 421 - RNA, 19 nt, synthetic construct
  source 1..19: mol_type = other RNA
tggaggtagtctaggaaag

SEQ ID NO: 422 - RNA, 19 nt, synthetic construct
  source 1..19: mol_type = other RNA
ggaggtagtctaggaaaga

SEQ ID NO: 423 - RNA, 19 nt, synthetic construct
  source 1..19: mol_type = other RNA
gaggtagtctaggaaagaa

SEQ ID NO: 424 - RNA, 19 nt, synthetic construct
  source 1..19: mol_type = other RNA
aggtagtctaggaaagaat

SEQ ID NO: 425 - RNA, 19 nt, synthetic construct
  source 1..19: mol_type = other RNA
ggtagtctaggaaagaata

SEQ ID NO: 426 - RNA, 19 nt, synthetic construct
  source 1..19: mol_type = other RNA
gtagtctaggaaagaatat

SEQ ID NO: 427 - RNA, 19 nt, synthetic construct
  source 1..19: mol_type = other RNA
tagtctaggaaagaatatc

SEQ ID NO: 428 - RNA, 19 nt, synthetic construct
  source 1..19: mol_type = other RNA
agtctaggaaagaatatca

SEQ ID NO: 429 - RNA, 19 nt, synthetic construct
  source 1..19: mol_type = other RNA
gtctaggaaagaatatcac

SEQ ID NO: 430 - RNA, 19 nt, synthetic construct
  source 1..19: mol_type = other RNA
tctaggaaagaatatcacc

SEQ ID NO: 431 - RNA, 19 nt, synthetic construct
  source 1..19: mol_type = other RNA
ctaggaaagaatatcacca

SEQ ID NO: 432 - RNA, 19 nt, synthetic construct
  source 1..19: mol_type = other RNA
taggaaagaatatcaccag

SEQ ID NO: 433 - RNA, 19 nt, synthetic construct
  source 1..19: mol_type = other RNA
aggaaagaatatcaccagt

SEQ ID NO: 434 - RNA, 19 nt, synthetic construct
  source 1..19: mol_type = other RNA
ggaaagaatatcaccagtt

SEQ ID NO: 435 - RNA, 19 nt, synthetic construct
  source 1..19: mol_type = other RNA
gaaagaatatcaccagttc

SEQ ID NO: 436 - RNA, 19 nt, synthetic construct
  source 1..19: mol_type = other RNA
aaagaatatcaccagttca

SEQ ID NO: 437 - RNA, 19 nt, synthetic construct
  source 1..19: mol_type = other RNA
aagaatatcaccagttcag

SEQ ID NO: 438 - RNA, 19 nt, synthetic construct
  source 1..19: mol_type = other RNA
agaatatcaccagttcagt

SEQ ID NO: 439 - RNA, 19 nt, synthetic construct
  source 1..19: mol_type = other RNA
gaatatcaccagttcagtc

SEQ ID NO: 440 - RNA, 19 nt, synthetic construct
  source 1..19: mol_type = other RNA
aatatcaccagttcagtct

SEQ ID NO: 441 - RNA, 19 nt, synthetic construct
  source 1..19: mol_type = other RNA
atatcaccagttcagtctt

SEQ ID NO: 442 - RNA, 19 nt, synthetic construct
  source 1..19: mol_type = other RNA
tatcaccagttcagtcttg

SEQ ID NO: 443 - RNA, 19 nt, synthetic construct
  source 1..19: mol_type = other RNA
atcaccagttcagtcttgg

SEQ ID NO: 444 - RNA, 19 nt, synthetic construct
  source 1..19: mol_type = other RNA
tcaccagttcagtcttggc

SEQ ID NO: 445 - RNA, 19 nt, synthetic construct
  source 1..19: mol_type = other RNA
caccagttcagtcttggct

SEQ ID NO: 446 - RNA, 19 nt, synthetic construct
  source 1..19: mol_type = other RNA
accagttcagtcttggcta

SEQ ID NO: 447 - RNA, 19 nt, synthetic construct
  source 1..19: mol_type = other RNA
ccagttcagtcttggctat

SEQ ID NO: 448 - RNA, 19 nt, synthetic construct
  source 1..19: mol_type = other RNA
cagttcagtcttggctata

SEQ ID NO: 449 - RNA, 19 nt, synthetic construct
  source 1..19: mol_type = other RNA
agttcagtcttggctatat

SEQ ID NO: 450 - RNA, 19 nt, synthetic construct
  source 1..19: mol_type = other RNA
gttcagtcttggctatatc

SEQ ID NO: 451 - RNA, 19 nt, synthetic construct
  source 1..19: mol_type = other RNA
ttcagtcttggctatatca

SEQ ID NO: 452 - RNA, 19 nt, synthetic construct
  source 1..19: mol_type = other RNA
tcagtcttggctatatcag

SEQ ID NO: 453 - RNA, 19 nt, synthetic construct
  source 1..19: mol_type = other RNA
cagtcttggctatatcagg

SEQ ID NO: 454 - RNA, 19 nt, synthetic construct
  source 1..19: mol_type = other RNA
agtcttggctatatcaggg

SEQ ID NO: 455 - RNA, 19 nt, synthetic construct
  source 1..19: mol_type = other RNA
gtcttggctatatcaggga

SEQ ID NO: 456 - RNA, 19 nt, synthetic construct
  source 1..19: mol_type = other RNA
tcttggctatatcagggat

SEQ ID NO: 457 - RNA, 19 nt, synthetic construct
  source 1..19: mol_type = other RNA
cttggctatatcagggatc

SEQ ID NO: 458 - RNA, 19 nt, synthetic construct
  source 1..19: mol_type = other RNA
ttggctatatcagggatct

SEQ ID NO: 459 - RNA, 19 nt, synthetic construct
  source 1..19: mol_type = other RNA
tggctatatcagggatctt

SEQ ID NO: 460 - RNA, 19 nt, synthetic construct
  source 1..19: mol_type = other RNA
ggctatatcagggatctta

SEQ ID NO: 461 - RNA, 19 nt, synthetic construct
  source 1..19: mol_type = other RNA
gctatatcagggatcttaa

SEQ ID NO: 462 - RNA, 19 nt, synthetic construct
  source 1..19: mol_type = other RNA
ctatatcagggatcttaat

SEQ ID NO: 463 - RNA, 19 nt, synthetic construct
  source 1..19: mol_type = other RNA
tatatcagggatcttaatc

SEQ ID NO: 464 - RNA, 19 nt, synthetic construct
  source 1..19: mol_type = other RNA
atatcagggatcttaatca

SEQ ID NO: 465 - RNA, 19 nt, synthetic construct
  source 1..19: mol_type = other RNA
tatcagggatcttaatcaa

SEQ ID NO: 466 - RNA, 19 nt, synthetic construct
  source 1..19: mol_type = other RNA
atcagggatcttaatcaat

SEQ ID NO: 467 - RNA, 19 nt, synthetic construct
  source 1..19: mol_type = other RNA
tcagggatcttaatcaatg

SEQ ID NO: 468 - RNA, 19 nt, synthetic construct
  source 1..19: mol_type = other RNA
cagggatcttaatcaatgc

SEQ ID NO: 469 - RNA, 19 nt, synthetic construct
  source 1..19: mol_type = other RNA
agggatcttaatcaatgca

SEQ ID NO: 470 - RNA, 19 nt, synthetic construct
  source 1..19: mol_type = other RNA
gggatcttaatcaatgcaa

SEQ ID NO: 471 - RNA, 19 nt, synthetic construct
  source 1..19: mol_type = other RNA
ggatcttaatcaatgcaat

SEQ ID NO: 472 - RNA, 19 nt, synthetic construct
  source 1..19: mol_type = other RNA
gatcttaatcaatgcaata

SEQ ID NO: 473 - RNA, 19 nt, synthetic construct
  source 1..19: mol_type = other RNA
atcttaatcaatgcaataa

SEQ ID NO: 474 - RNA, 19 nt, synthetic construct
  source 1..19: mol_type = other RNA
tcttaatcaatgcaataag

SEQ ID NO: 475 - RNA, 19 nt, synthetic construct
  source 1..19: mol_type = other RNA
cttaatcaatgcaataagc

SEQ ID NO: 476 - RNA, 19 nt, synthetic construct
  source 1..19: mol_type = other RNA
ttaatcaatgcaataagct

SEQ ID NO: 477 - RNA, 19 nt, synthetic construct
  source 1..19: mol_type = other RNA
taatcaatgcaataagctt

SEQ ID NO: 478 - RNA, 19 nt, synthetic construct
  source 1..19: mol_type = other RNA
aatcaatgcaataagcttg

SEQ ID NO: 479 - RNA, 19 nt, synthetic construct
  source 1..19: mol_type = other RNA
atcaatgcaataagcttga

SEQ ID NO: 480 - RNA, 19 nt, synthetic construct
  source 1..19: mol_type = other RNA
tcaatgcaataagcttgac

SEQ ID NO: 481 - RNA, 19 nt, synthetic construct
  source 1..19: mol_type = other RNA
caatgcaataagcttgacg

SEQ ID NO: 482 - RNA, 19 nt, synthetic construct
  source 1..19: mol_type = other RNA
aatgcaataagcttgacgt

SEQ ID NO: 483 - RNA, 19 nt, synthetic construct
  source 1..19: mol_type = other RNA
atgcaataagcttgacgtt

SEQ ID NO: 484 - RNA, 19 nt, synthetic construct
  source 1..19: mol_type = other RNA
tgcaataagcttgacgttt

SEQ ID NO: 485 - RNA, 19 nt, synthetic construct
  source 1..19: mol_type = other RNA
gcaataagcttgacgtttt

SEQ ID NO: 486 - RNA, 19 nt, synthetic construct
  source 1..19: mol_type = other RNA
caataagcttgacgtttta

SEQ ID NO: 487 - RNA, 19 nt, synthetic construct
  source 1..19: mol_type = other RNA
aataagcttgacgttttat

SEQ ID NO: 488 - RNA, 19 nt, synthetic construct
  source 1..19: mol_type = other RNA
ataagcttgacgttttatt

SEQ ID NO: 489 - RNA, 19 nt, synthetic construct
  source 1..19: mol_type = other RNA
taagcttgacgttttattc

SEQ ID NO: 490 - RNA, 19 nt, synthetic construct
  source 1..19: mol_type = other RNA
aagcttgacgttttattca

SEQ ID NO: 491 - RNA, 19 nt, synthetic construct
  source 1..19: mol_type = other RNA
agcttgacgttttattcat

SEQ ID NO: 492 - RNA, 19 nt, synthetic construct
  source 1..19: mol_type = other RNA
gcttgacgttttattcatt

SEQ ID NO: 493 - RNA, 19 nt, synthetic construct
  source 1..19: mol_type = other RNA
cttgacgttttattcattc

SEQ ID NO: 494 - RNA, 19 nt, synthetic construct
  source 1..19: mol_type = other RNA
ttgacgttttattcattcc

SEQ ID NO: 495 - RNA, 19 nt, synthetic construct
  source 1..19: mol_type = other RNA
tgacgttttattcattccg

SEQ ID NO: 496 - RNA, 19 nt, synthetic construct
  source 1..19: mol_type = other RNA
gacgttttattcattccgt

SEQ ID NO: 497 - RNA, 19 nt, synthetic construct
  source 1..19: mol_type = other RNA
acgttttattcattccgtt

SEQ ID NO: 498 - RNA, 19 nt, synthetic construct
  source 1..19: mol_type = other RNA
cgttttattcattccgtta

SEQ ID NO: 499 - RNA, 19 nt, synthetic construct
  source 1..19: mol_type = other RNA
gttttattcattccgttac

SEQ ID NO: 500 - RNA, 19 nt, synthetic construct
  source 1..19: mol_type = other RNA
ttttattcattccgttacc

SEQ ID NO: 501 - RNA, 19 nt, synthetic construct
  source 1..19: mol_type = other RNA
tttattcattccgttacca

SEQ ID NO: 502 - RNA, 19 nt, synthetic construct
  source 1..19: mol_type = other RNA
ttattcattccgttaccat

SEQ ID NO: 503 - RNA, 19 nt, synthetic construct
  source 1..19: mol_type = other RNA
tattcattccgttaccatt

SEQ ID NO: 504 - RNA, 19 nt, synthetic construct
  source 1..19: mol_type = other RNA
attcattccgttaccatta

SEQ ID NO: 505 - RNA, 19 nt, synthetic construct
  source 1..19: mol_type = other RNA
ttcattccgttaccattac

SEQ ID NO: 506 - RNA, 19 nt, synthetic construct
  source 1..19: mol_type = other RNA
tcattccgttaccattact

SEQ ID NO: 507 - RNA, 19 nt, synthetic construct
  source 1..19: mol_type = other RNA
cattccgttaccattactg

SEQ ID NO: 508 - RNA, 19 nt, synthetic construct
  source 1..19: mol_type = other RNA
attccgttaccattactgt

SEQ ID NO: 509 - RNA, 19 nt, synthetic construct
  source 1..19: mol_type = other RNA
ttccgttaccattactgta

SEQ ID NO: 510 - RNA, 19 nt, synthetic construct
  source 1..19: mol_type = other RNA
tccgttaccattactgtaa

SEQ ID NO: 511 - RNA, 19 nt, synthetic construct
  source 1..19: mol_type = other RNA
ccgttaccattactgtaac

SEQ ID NO: 512 - RNA, 19 nt, synthetic construct
  source 1..19: mol_type = other RNA
cgttaccattactgtaacc

SEQ ID NO: 513 - RNA, 19 nt, synthetic construct
  source 1..19: mol_type = other RNA
gttaccattactgtaacca

SEQ ID NO: 514 - RNA, 19 nt, synthetic construct
  source 1..19: mol_type = other RNA
ttaccattactgtaaccac

SEQ ID NO: 515 - RNA, 19 nt, synthetic construct
  source 1..19: mol_type = other RNA
taccattactgtaaccacg

SEQ ID NO: 516 - RNA, 19 nt, synthetic construct
  source 1..19: mol_type = other RNA
accattactgtaaccacga

SEQ ID NO: 517 - RNA, 19 nt, synthetic construct
  source 1..19: mol_type = other RNA
ccattactgtaaccacgat

SEQ ID NO: 518 - RNA, 19 nt, synthetic construct
  source 1..19: mol_type = other RNA
cattactgtaaccacgatc

SEQ ID NO: 519 - RNA, 19 nt, synthetic construct
  source 1..19: mol_type = other RNA
attactgtaaccacgatca

SEQ ID NO: 520 - RNA, 19 nt, synthetic construct
  source 1..19: mol_type = other RNA
ttactgtaaccacgatcag

SEQ ID NO: 521 - RNA, 19 nt, synthetic construct
  source 1..19: mol_type = other RNA
tactgtaaccacgatcagt

SEQ ID NO: 522 - RNA, 19 nt, synthetic construct
  source 1..19: mol_type = other RNA
actgtaaccacgatcagtt

SEQ ID NO: 523 - RNA, 19 nt, synthetic construct
  source 1..19: mol_type = other RNA
ctgtaaccacgatcagttg

SEQ ID NO: 524 - RNA, 19 nt, synthetic construct
  source 1..19: mol_type = other RNA
tgtaaccacgatcagttgt

SEQ ID NO: 525 - RNA, 19 nt, synthetic construct
  source 1..19: mol_type = other RNA
gtaaccacgatcagttgtc

SEQ ID NO: 526 - RNA, 19 nt, synthetic construct
  source 1..19: mol_type = other RNA
taaccacgatcagttgtca

SEQ ID NO: 527 - RNA, 19 nt, synthetic construct
  source 1..19: mol_type = other RNA
aaccacgatcagttgtcaa

SEQ ID NO: 528 - RNA, 19 nt, synthetic construct
  source 1..19: mol_type = other RNA
accacgatcagttgtcaag

SEQ ID NO: 529 - RNA, 19 nt, synthetic construct
  source 1..19: mol_type = other RNA
ccacgatcagttgtcaagt

SEQ ID NO: 530 - RNA, 19 nt, synthetic construct
  source 1..19: mol_type = other RNA
cacgatcagttgtcaagta

SEQ ID NO: 531 - RNA, 19 nt, synthetic construct
  source 1..19: mol_type = other RNA
acgatcagttgtcaagtaa

SEQ ID NO: 532 - RNA, 19 nt, synthetic construct
  source 1..19: mol_type = other RNA
cgatcagttgtcaagtaat

SEQ ID NO: 533 - RNA, 19 nt, synthetic construct
  source 1..19: mol_type = other RNA
gatcagttgtcaagtaatt

SEQ ID NO: 534 - RNA, 19 nt, synthetic construct
  source 1..19: mol_type = other RNA
atcagttgtcaagtaattg

SEQ ID NO: 535 - RNA, 19 nt, synthetic construct
  source 1..19: mol_type = other RNA
tcagttgtcaagtaattgt

SEQ ID NO: 536 - RNA, 19 nt, synthetic construct
  source 1..19: mol_type = other RNA
cagttgtcaagtaattgtt

SEQ ID NO: 537 - RNA, 19 nt, synthetic construct
  source 1..19: mol_type = other RNA
agttgtcaagtaattgtta

SEQ ID NO: 538 - RNA, 19 nt, synthetic construct
  source 1..19: mol_type = other RNA
gttgtcaagtaattgttac

SEQ ID NO: 539 - RNA, 19 nt, synthetic construct
  source 1..19: mol_type = other RNA
ttgtcaagtaattgttaca

SEQ ID NO: 540 - RNA, 19 nt, synthetic construct
  source 1..19: mol_type = other RNA
tgtcaagtaattgttacat

SEQ ID NO: 541 - RNA, 19 nt, synthetic construct
  source 1..19: mol_type = other RNA
gtcaagtaattgttacatg

SEQ ID NO: 542 - RNA, 19 nt, synthetic construct
  source 1..19: mol_type = other RNA
tcaagtaattgttacatga

SEQ ID NO: 543 - RNA, 19 nt, synthetic construct
  source 1..19: mol_type = other RNA
caagtaattgttacatgac

SEQ ID NO: 544 - RNA, 19 nt, synthetic construct
  source 1..19: mol_type = other RNA
aagtaattgttacatgact

SEQ ID NO: 545 - RNA, 19 nt, synthetic construct
  source 1..19: mol_type = other RNA
agtaattgttacatgacta

SEQ ID NO: 546 - RNA, 19 nt, synthetic construct
  source 1..19: mol_type = other RNA
gtaattgttacatgactat

SEQ ID NO: 547 - RNA, 19 nt, synthetic construct
  source 1..19: mol_type = other RNA
taattgttacatgactatg

SEQ ID NO: 548 - RNA, 19 nt, synthetic construct
  source 1..19: mol_type = other RNA
aattgttacatgactatgt

SEQ ID NO: 549 - RNA, 19 nt, synthetic construct
  source 1..19: mol_type = other RNA
attgttacatgactatgtc

SEQ ID NO: 550 - RNA, 19 nt, synthetic construct
  source 1..19: mol_type = other RNA
ttgttacatgactatgtcc

SEQ ID NO: 551 - RNA, 19 nt, synthetic construct
  source 1..19: mol_type = other RNA
tgttacatgactatgtcca

SEQ ID NO: 552 - RNA, 19 nt, synthetic construct
  source 1..19: mol_type = other RNA
gttacatgactatgtccat

SEQ ID NO: 553 - RNA, 19 nt, synthetic construct
  source 1..19: mol_type = other RNA
ttacatgactatgtccatt

SEQ ID NO: 554 - RNA, 19 nt, synthetic construct
  source 1..19: mol_type = other RNA
tacatgactatgtccattt

SEQ ID NO: 555 - RNA, 19 nt, synthetic construct
  source 1..19: mol_type = other RNA
acatgactatgtccatttt

SEQ ID NO: 556 - RNA, 19 nt, synthetic construct
  source 1..19: mol_type = other RNA
catgactatgtccatttta

SEQ ID NO: 557 - RNA, 19 nt, synthetic construct
  source 1..19: mol_type = other RNA
atgactatgtccattttaa

SEQ ID NO: 558 - RNA, 19 nt, synthetic construct
  source 1..19: mol_type = other RNA
tgactatgtccattttaat

SEQ ID NO: 559 - RNA, 19 nt, synthetic construct
  source 1..19: mol_type = other RNA
gactatgtccattttaatg

SEQ ID NO: 560 - RNA, 19 nt, synthetic construct
  source 1..19: mol_type = other RNA
actatgtccattttaatgg

SEQ ID NO: 561 - RNA, 19 nt, synthetic construct
  source 1..19: mol_type = other RNA
ctatgtccattttaatggg

SEQ ID NO: 562 - RNA, 19 nt, synthetic construct
  source 1..19: mol_type = other RNA
tatgtccattttaatgggt

SEQ ID NO: 563 - RNA, 19 nt, synthetic construct
  source 1..19: mol_type = other RNA
atgtccattttaatgggta

SEQ ID NO: 564 - RNA, 19 nt, synthetic construct
  source 1..19: mol_type = other RNA
tgtccattttaatgggtac

SEQ ID NO: 565 - RNA, 19 nt, synthetic construct
  source 1..19: mol_type = other RNA
gtccattttaatgggtacg

SEQ ID NO: 566 - RNA, 19 nt, synthetic construct
  source 1..19: mol_type = other RNA
tccattttaatgggtacgg

SEQ ID NO: 567 - RNA, 19 nt, synthetic construct
  source 1..19: mol_type = other RNA
ccattttaatgggtacgga

SEQ ID NO: 568 - RNA, 19 nt, synthetic construct
  source 1..19: mol_type = other RNA
cattttaatgggtacggat

SEQ ID NO: 569 - RNA, 19 nt, synthetic construct
  source 1..19: mol_type = other RNA
attttaatgggtacggatg

SEQ ID NO: 570 - RNA, 19 nt, synthetic construct
  source 1..19: mol_type = other RNA
ttttaatgggtacggatgg

SEQ ID NO: 571 - RNA, 19 nt, synthetic construct
  source 1..19: mol_type = other RNA
tttaatgggtacggatggc

SEQ ID NO: 572 - RNA, 19 nt, synthetic construct
  source 1..19: mol_type = other RNA
ttaatgggtacggatggca

SEQ ID NO: 573 - RNA, 19 nt, synthetic construct
  source 1..19: mol_type = other RNA
taatgggtacggatggcat

SEQ ID NO: 574 - RNA, 19 nt, synthetic construct
  source 1..19: mol_type = other RNA
aatgggtacggatggcatg

SEQ ID NO: 575 - RNA, 19 nt, synthetic construct
  source 1..19: mol_type = other RNA
atgggtacggatggcatgg

SEQ ID NO: 576 - RNA, 19 nt, synthetic construct
  source 1..19: mol_type = other RNA
tgggtacggatggcatggt

SEQ ID NO: 577 - RNA, 19 nt, synthetic construct
  source 1..19: mol_type = other RNA
gggtacggatggcatggtg

SEQ ID NO: 578 - RNA, 19 nt, synthetic construct
  source 1..19: mol_type = other RNA
ggtacggatggcatggtgc

SEQ ID NO: 579 - RNA, 19 nt, synthetic construct
  source 1..19: mol_type = other RNA
gtacggatggcatggtgct

SEQ ID NO: 580 - RNA, 19 nt, synthetic construct
  source 1..19: mol_type = other RNA
tacggatggcatggtgctc

SEQ ID NO: 581 - RNA, 19 nt, synthetic construct
  source 1..19: mol_type = other RNA
acggatggcatggtgctcc

SEQ ID NO: 582 - RNA, 19 nt, synthetic construct
  source 1..19: mol_type = other RNA
cggatggcatggtgctcct

SEQ ID NO: 583 - RNA, 19 nt, synthetic construct
  source 1..19: mol_type = other RNA
ggatggcatggtgctcctc

SEQ ID NO: 584 - RNA, 19 nt, synthetic construct
  source 1..19: mol_type = other RNA
gatggcatggtgctcctct

SEQ ID NO: 585 - RNA, 19 nt, synthetic construct
  source 1..19: mol_type = other RNA
atggcatggtgctcctctt

SEQ ID NO: 586 - RNA, 19 nt, synthetic construct
  source 1..19: mol_type = other RNA
tggcatggtgctcctctta

SEQ ID NO: 587 - RNA, 19 nt, synthetic construct
  source 1..19: mol_type = other RNA
ggcatggtgctcctcttaa

SEQ ID NO: 588 - RNA, 19 nt, synthetic construct
  source 1..19: mol_type = other RNA
gcatggtgctcctcttaag

SEQ ID NO: 589 - RNA, 19 nt, synthetic construct
  source 1..19: mol_type = other RNA
catggtgctcctcttaagt

SEQ ID NO: 590 - RNA, 19 nt, synthetic construct
  source 1..19: mol_type = other RNA
atggtgctcctcttaagtg

SEQ ID NO: 591 - RNA, 19 nt, synthetic construct
  source 1..19: mol_type = other RNA
tggtgctcctcttaagtgt

SEQ ID NO: 592 - RNA, 19 nt, synthetic construct
  source 1..19: mol_type = other RNA
ggtgctcctcttaagtgtg

SEQ ID NO: 593 - RNA, 19 nt, synthetic construct
  source 1..19: mol_type = other RNA
gtgctcctcttaagtgtgc

SEQ ID NO: 594 - RNA, 19 nt, synthetic construct
  source 1..19: mol_type = other RNA
tgctcctcttaagtgtgct

SEQ ID NO: 595 - RNA, 19 nt, synthetic construct
  source 1..19: mol_type = other RNA
gctcctcttaagtgtgctg

SEQ ID NO: 596 - RNA, 19 nt, synthetic construct
  source 1..19: mol_type = other RNA
ctcctcttaagtgtgctgg

SEQ ID NO: 597 - RNA, 19 nt, synthetic construct
  source 1..19: mol_type = other RNA
tcctcttaagtgtgctgga

SEQ ID NO: 598 - RNA, 19 nt, synthetic construct
  source 1..19: mol_type = other RNA
cctcttaagtgtgctggaa

SEQ ID NO: 599 - RNA, 19 nt, synthetic construct
  source 1..19: mol_type = other RNA
ctcttaagtgtgctggaat

SEQ ID NO: 600 - RNA, 19 nt, synthetic construct
  source 1..19: mol_type = other RNA
tcttaagtgtgctggaatt

SEQ ID NO: 601 - RNA, 19 nt, synthetic construct
  source 1..19: mol_type = other RNA
cttaagtgtgctggaattc

SEQ ID NO: 602 - RNA, 19 nt, synthetic construct
  source 1..19: mol_type = other RNA
ttaagtgtgctggaattct

SEQ ID NO: 603 - RNA, 19 nt, synthetic construct
  source 1..19: mol_type = other RNA
taagtgtgctggaattctg

SEQ ID NO: 604 - RNA, 19 nt, synthetic construct
  source 1..19: mol_type = other RNA
aagtgtgctggaattctgc

SEQ ID NO: 605 - RNA, 19 nt, synthetic construct
  source 1..19: mol_type = other RNA
agtgtgctggaattctgca

SEQ ID NO: 606 - RNA, 19 nt, synthetic construct
  source 1..19: mol_type = other RNA
gtgtgctggaattctgcat

SEQ ID NO: 607 - RNA, 19 nt, synthetic construct
  source 1..19: mol_type = other RNA
tgtgctggaattctgcatt

SEQ ID NO: 608 - RNA, 19 nt, synthetic construct
  source 1..19: mol_type = other RNA
gtgctggaattctgcattg

SEQ ID NO: 609 - RNA, 19 nt, synthetic construct
  source 1..19: mol_type = other RNA
tgctggaattctgcattgc

SEQ ID NO: 610 - RNA, 19 nt, synthetic construct
  source 1..19: mol_type = other RNA
gctggaattctgcattgct

SEQ ID NO: 611 - RNA, 19 nt, synthetic construct
  source 1..19: mol_type = other RNA
ctggaattctgcattgctg

SEQ ID NO: 612 - RNA, 19 nt, synthetic construct
  source 1..19: mol_type = other RNA
tggaattctgcattgctgt

SEQ ID NO: 613 - RNA, 19 nt, synthetic construct
  source 1..19: mol_type = other RNA
ggaattctgcattgctgtg

SEQ ID NO: 614 - RNA, 19 nt, synthetic construct
  source 1..19: mol_type = other RNA
gaattctgcattgctgtgg

SEQ ID NO: 615 - RNA, 19 nt, synthetic construct
  source 1..19: mol_type = other RNA
aattctgcattgctgtggc

SEQ ID NO: 616 - RNA, 19 nt, synthetic construct
  source 1..19: mol_type = other RNA
attctgcattgctgtggcc

SEQ ID NO: 617 - RNA, 19 nt, synthetic construct
  source 1..19: mol_type = other RNA
ttctgcattgctgtggccc

SEQ ID NO: 618 - RNA, 19 nt, synthetic construct
  source 1..19: mol_type = other RNA
tctgcattgctgtggccct

SEQ ID NO: 619 - RNA, 19 nt, synthetic construct
  source 1..19: mol_type = other RNA
ctgcattgctgtggccctc

SEQ ID NO: 620 - RNA, 19 nt, synthetic construct
  source 1..19: mol_type = other RNA
tgcattgctgtggccctct

SEQ ID NO: 621 - RNA, 19 nt, synthetic construct
  source 1..19: mol_type = other RNA
gcattgctgtggccctctc

SEQ ID NO: 622 - RNA, 19 nt, synthetic construct
  source 1..19: mol_type = other RNA
cattgctgtggccctctct

SEQ ID NO: 623 - RNA, 19 nt, synthetic construct
  source 1..19: mol_type = other RNA
attgctgtggccctctctg

SEQ ID NO: 624 - RNA, 19 nt, synthetic construct
  source 1..19: mol_type = other RNA
ttgctgtggccctctctgc

SEQ ID NO: 625 - RNA, 19 nt, synthetic construct
  source 1..19: mol_type = other RNA
tgctgtggccctctctgcc

SEQ ID NO: 626 - RNA, 19 nt, synthetic construct
  source 1..19: mol_type = other RNA
gctgtggccctctctgcct

SEQ ID NO: 627 - RNA, 19 nt, synthetic construct
  source 1..19: mol_type = other RNA
ctgtggccctctctgcctt

SEQ ID NO: 628 - RNA, 19 nt, synthetic construct
  source 1..19: mol_type = other RNA
tgtggccctctctgccttt

SEQ ID NO: 629 - RNA, 19 nt, synthetic construct
  source 1..19: mol_type = other RNA
gtggccctctctgcctttg

SEQ ID NO: 630 - RNA, 19 nt, synthetic construct
  source 1..19: mol_type = other RNA
tggccctctctgcctttgg

SEQ ID NO: 631 - RNA, 19 nt, synthetic construct
  source 1..19: mol_type = other RNA
ggccctctctgcctttgga

SEQ ID NO: 632 - RNA, 19 nt, synthetic construct
  source 1..19: mol_type = other RNA
gccctctctgcctttggat

SEQ ID NO: 633 - RNA, 19 nt, synthetic construct
  source 1..19: mol_type = other RNA
ccctctctgcctttggatg

SEQ ID NO: 634 - RNA, 19 nt, synthetic construct
  source 1..19: mol_type = other RNA
cctctctgcctttggatgt

SEQ ID NO: 635 - RNA, 19 nt, synthetic construct
  source 1..19: mol_type = other RNA
ctctctgcctttggatgta

SEQ ID NO: 636 - RNA, 19 nt, synthetic construct
  source 1..19: mol_type = other RNA
tctctgcctttggatgtaa

SEQ ID NO: 637 - RNA, 19 nt, synthetic construct
  source 1..19: mol_type = other RNA
ctctgcctttggatgtaaa

SEQ ID NO: 638 - RNA, 19 nt, synthetic construct
  source 1..19: mol_type = other RNA
tctgcctttggatgtaaag

SEQ ID NO: 639 - RNA, 19 nt, synthetic construct
  source 1..19: mol_type = other RNA
ctgcctttggatgtaaagt

SEQ ID NO: 640 - RNA, 19 nt, synthetic construct
  source 1..19: mol_type = other RNA
tgcctttggatgtaaagtg

SEQ ID NO: 641 - RNA, 19 nt, synthetic construct
  source 1..19: mol_type = other RNA
gcctttggatgtaaagtgc

SEQ ID NO: 642 - RNA, 19 nt, synthetic construct
  source 1..19: mol_type = other RNA
cctttggatgtaaagtgct

SEQ ID NO: 643 - RNA, 19 nt, synthetic construct
  source 1..19: mol_type = other RNA
ctttggatgtaaagtgctt

SEQ ID NO: 644 - RNA, 19 nt, synthetic construct
  source 1..19: mol_type = other RNA
tttggatgtaaagtgcttt

SEQ ID NO: 645 - RNA, 19 nt, synthetic construct
  source 1..19: mol_type = other RNA
ttggatgtaaagtgctttg

SEQ ID NO: 646 - RNA, 19 nt, synthetic construct
  source 1..19: mol_type = other RNA
tggatgtaaagtgctttgt

SEQ ID NO: 647 - RNA, 19 nt, synthetic construct
  source 1..19: mol_type = other RNA
ggatgtaaagtgctttgtt

SEQ ID NO: 648 - RNA, 19 nt, synthetic construct
  source 1..19: mol_type = other RNA
gatgtaaagtgctttgttg

SEQ ID NO: 649 - RNA, 19 nt, synthetic construct
  source 1..19: mol_type = other RNA
atgtaaagtgctttgttgt

SEQ ID NO: 650 - RNA, 19 nt, synthetic construct
  source 1..19: mol_type = other RNA
tgtaaagtgctttgttgta

SEQ ID NO: 651 - RNA, 19 nt, synthetic construct
  source 1..19: mol_type = other RNA
gtaaagtgctttgttgtag

SEQ ID NO: 652 - RNA, 19 nt, synthetic construct
  source 1..19: mol_type = other RNA
taaagtgctttgttgtagc

SEQ ID NO: 653 - RNA, 19 nt, synthetic construct
  source 1..19: mol_type = other RNA
aaagtgctttgttgtagcc

SEQ ID NO: 654 - RNA, 19 nt, synthetic construct
  source 1..19: mol_type = other RNA
aagtgctttgttgtagccc

SEQ ID NO: 655 - RNA, 19 nt, synthetic construct
  source 1..19: mol_type = other RNA
agtgctttgttgtagcccc

SEQ ID NO: 656 - RNA, 19 nt, synthetic construct
  source 1..19: mol_type = other RNA
gtgctttgttgtagcccca

SEQ ID NO: 657 - RNA, 19 nt, synthetic construct
  source 1..19: mol_type = other RNA
tgctttgttgtagccccag

SEQ ID NO: 658 - RNA, 19 nt, synthetic construct
  source 1..19: mol_type = other RNA
gctttgttgtagccccagt

SEQ ID NO: 659 - RNA, 19 nt, synthetic construct
  source 1..19: mol_type = other RNA
ctttgttgtagccccagtg

SEQ ID NO: 660 - RNA, 19 nt, synthetic construct
  source 1..19: mol_type = other RNA
tttgttgtagccccagtga

SEQ ID NO: 661 - RNA, 19 nt, synthetic construct
  source 1..19: mol_type = other RNA
ttgttgtagccccagtgag

SEQ ID NO: 662 - RNA, 19 nt, synthetic construct
  source 1..19: mol_type = other RNA
tgttgtagccccagtgaga

SEQ ID NO: 663 - RNA, 19 nt, synthetic construct
  source 1..19: mol_type = other RNA
gttgtagccccagtgagag

SEQ ID NO: 664 - RNA, 19 nt, synthetic construct
  source 1..19: mol_type = other RNA
ttgtagccccagtgagagc

SEQ ID NO: 665 - RNA, 19 nt, synthetic construct
  source 1..19: mol_type = other RNA
tgtagccccagtgagagca

SEQ ID NO: 666 - RNA, 19 nt, synthetic construct
  source 1..19: mol_type = other RNA
gtagccccagtgagagcaa

SEQ ID NO: 667 - RNA, 19 nt, synthetic construct
  source 1..19: mol_type = other RNA
tagccccagtgagagcaaa

SEQ ID NO: 668 - RNA, 19 nt, synthetic construct
  source 1..19: mol_type = other RNA
agccccagtgagagcaaaa

SEQ ID NO: 669 - RNA, 19 nt, synthetic construct
  source 1..19: mol_type = other RNA
gccccagtgagagcaaaaa

SEQ ID NO: 670 - RNA, 19 nt, synthetic construct
  source 1..19: mol_type = other RNA
ccccagtgagagcaaaaat

SEQ ID NO: 671 - RNA, 19 nt, synthetic construct
  source 1..19: mol_type = other RNA
cccagtgagagcaaaaata

SEQ ID NO: 672 - RNA, 19 nt, synthetic construct
  source 1..19: mol_type = other RNA
ccagtgagagcaaaaataa

SEQ ID NO: 673 - RNA, 19 nt, synthetic construct
  source 1..19: mol_type = other RNA
cagtgagagcaaaaataaa

SEQ ID NO: 674 - RNA, 19 nt, synthetic construct
  source 1..19: mol_type = other RNA
agtgagagcaaaaataaaa

SEQ ID NO: 675 - RNA, 19 nt, synthetic construct
  source 1..19: mol_type = other RNA
gtgagagcaaaaataaaat

SEQ ID NO: 676 - RNA, 19 nt, synthetic construct
  source 1..19: mol_type = other RNA
tgagagcaaaaataaaatt

SEQ ID NO: 677 - RNA, 19 nt, synthetic construct
  source 1..19: mol_type = other RNA
gagagcaaaaataaaatta

SEQ ID NO: 678 - RNA, 19 nt, synthetic construct
  source 1..19: mol_type = other RNA
agagcaaaaataaaattag

SEQ ID NO: 679 - RNA, 19 nt, synthetic construct
  source 1..19: mol_type = other RNA
gagcaaaaataaaattaga

SEQ ID NO: 680 - RNA, 19 nt, synthetic construct
  source 1..19: mol_type = other RNA
agcaaaaataaaattagaa

SEQ ID NO: 681 - RNA, 19 nt, synthetic construct
  source 1..19: mol_type = other RNA
gcaaaaataaaattagaag

SEQ ID NO: 682 - RNA, 19 nt, synthetic construct
  source 1..19: mol_type = other RNA
caaaaataaaattagaagc

SEQ ID NO: 683 - RNA, 19 nt, synthetic construct
  source 1..19: mol_type = other RNA
aaaaataaaattagaagca

SEQ ID NO: 684 - RNA, 19 nt, synthetic construct
  source 1..19: mol_type = other RNA
aaaataaaattagaagcaa

SEQ ID NO: 685 - RNA, 19 nt, synthetic construct
  source 1..19: mol_type = other RNA
aaataaaattagaagcaat

SEQ ID NO: 686 - RNA, 19 nt, synthetic construct
  source 1..19: mol_type = other RNA
aataaaattagaagcaata

SEQ ID NO: 687 - RNA, 19 nt, synthetic construct
  source 1..19: mol_type = other RNA
ataaaattagaagcaatac

SEQ ID NO: 688 - RNA, 19 nt, synthetic construct
  source 1..19: mol_type = other RNA
taaaattagaagcaatact

SEQ ID NO: 689 - RNA, 19 nt, synthetic construct
  source 1..19: mol_type = other RNA
aaaattagaagcaatactt

SEQ ID NO: 690 - RNA, 19 nt, synthetic construct
  source 1..19: mol_type = other RNA
aaattagaagcaatacttt

SEQ ID NO: 691 - RNA, 19 nt, synthetic construct
  source 1..19: mol_type = other RNA
aattagaagcaatactttc

SEQ ID NO: 692 - RNA, 19 nt, synthetic construct
  source 1..19: mol_type = other RNA
attagaagcaatactttca

SEQ ID NO: 693 - RNA, 19 nt, synthetic construct
  source 1..19: mol_type = other RNA
ttagaagcaatactttcat

SEQ ID NO: 694 - RNA, 19 nt, synthetic construct
  source 1..19: mol_type = other RNA
tagaagcaatactttcatg

SEQ ID NO: 695 - RNA, 19 nt, synthetic construct
  source 1..19: mol_type = other RNA
agaagcaatactttcatgt

SEQ ID NO: 696 - RNA, 19 nt, synthetic construct
  source 1..19: mol_type = other RNA
gaagcaatactttcatgtg

SEQ ID NO: 697 - RNA, 19 nt, synthetic construct
  source 1..19: mol_type = other RNA
aagcaatactttcatgtgc

SEQ ID NO: 698 - RNA, 19 nt, synthetic construct
  source 1..19: mol_type = other RNA
agcaatactttcatgtgct

SEQ ID NO: 699 - RNA, 19 nt, synthetic construct
  source 1..19: mol_type = other RNA
gcaatactttcatgtgcta

SEQ ID NO: 700 - RNA, 19 nt, synthetic construct
  source 1..19: mol_type = other RNA
caatactttcatgtgctac

SEQ ID NO: 701 - RNA, 19 nt, synthetic construct
  source 1..19: mol_type = other RNA
aatactttcatgtgctacc

SEQ ID NO: 702 - RNA, 19 nt, synthetic construct
  source 1..19: mol_type = other RNA
atactttcatgtgctacct

SEQ ID NO: 703 - RNA, 19 nt, synthetic construct
  source 1..19: mol_type = other RNA
tactttcatgtgctacctc

SEQ ID NO: 704 - RNA, 19 nt, synthetic construct
  source 1..19: mol_type = other RNA
actttcatgtgctacctcc

SEQ ID NO: 705 - RNA, 19 nt, synthetic construct
  source 1..19: mol_type = other RNA
ctttcatgtgctacctcct

SEQ ID NO: 706 - RNA, 19 nt, synthetic construct
  source 1..19: mol_type = other RNA
tttcatgtgctacctcctt

SEQ ID NO: 707 - RNA, 19 nt, synthetic construct
  source 1..19: mol_type = other RNA
ttcatgtgctacctccttt

SEQ ID NO: 708 - RNA, 19 nt, synthetic construct
  source 1..19: mol_type = other RNA
tcatgtgctacctcctttc

SEQ ID NO: 709 - RNA, 19 nt, synthetic construct
  source 1..19: mol_type = other RNA
catgtgctacctcctttct

SEQ ID NO: 710 - RNA, 19 nt, synthetic construct
  source 1..19: mol_type = other RNA
atgtgctacctcctttcta

SEQ ID NO: 711 - RNA, 19 nt, synthetic construct
  source 1..19: mol_type = other RNA
tgtgctacctcctttctat

SEQ ID NO: 712 - RNA, 19 nt, synthetic construct
  source 1..19: mol_type = other RNA
gtgctacctcctttctatt

SEQ ID NO: 713 - RNA, 19 nt, synthetic construct
  source 1..19: mol_type = other RNA
tgctacctcctttctattc

SEQ ID NO: 714 - RNA, 19 nt, synthetic construct
  source 1..19: mol_type = other RNA
gctacctcctttctattca

SEQ ID NO: 715 - RNA, 19 nt, synthetic construct
  source 1..19: mol_type = other RNA
ctacctcctttctattcag

SEQ ID NO: 716 - RNA, 19 nt, synthetic construct
  source 1..19: mol_type = other RNA
tacctcctttctattcaga

SEQ ID NO: 717 - RNA, 19 nt, synthetic construct
  source 1..19: mol_type = other RNA
acctcctttctattcagat

SEQ ID NO: 718 - RNA, 19 nt, synthetic construct
  source 1..19: mol_type = other RNA
cctcctttctattcagatg

SEQ ID NO: 719 - RNA, 19 nt, synthetic construct
  source 1..19: mol_type = other RNA
ctcctttctattcagatgc

SEQ ID NO: 720 - RNA, 19 nt, synthetic construct
  source 1..19: mol_type = other RNA
tcctttctattcagatgca

SEQ ID NO: 721 - RNA, 19 nt, synthetic construct
  source 1..19: mol_type = other RNA
cctttctattcagatgcaa

SEQ ID NO: 722 - RNA, 19 nt, synthetic construct
  source 1..19: mol_type = other RNA
ctttctattcagatgcaat

SEQ ID NO: 723 - RNA, 19 nt, synthetic construct
  source 1..19: mol_type = other RNA
tttctattcagatgcaata

SEQ ID NO: 724 - RNA, 19 nt, synthetic construct
  source 1..19: mol_type = other RNA
ttctattcagatgcaatat

SEQ ID NO: 725 - RNA, 19 nt, synthetic construct
  source 1..19: mol_type = other RNA
tctattcagatgcaatatg

SEQ ID NO: 726 - RNA, 19 nt, synthetic construct
  source 1..19: mol_type = other RNA
ctattcagatgcaatatga

SEQ ID NO: 727 - RNA, 19 nt, synthetic construct
  source 1..19: mol_type = other RNA
tattcagatgcaatatgat

SEQ ID NO: 728 - RNA, 19 nt, synthetic construct
  source 1..19: mol_type = other RNA
attcagatgcaatatgatg

SEQ ID NO: 729 - RNA, 19 nt, synthetic construct
  source 1..19: mol_type = other RNA
ttcagatgcaatatgatgg

SEQ ID NO: 730 - RNA, 19 nt, synthetic construct
  source 1..19: mol_type = other RNA
tcagatgcaatatgatgga

SEQ ID NO: 731 - RNA, 19 nt, synthetic construct
  source 1..19: mol_type = other RNA
cagatgcaatatgatggaa

SEQ ID NO: 732 - RNA, 19 nt, synthetic construct
  source 1..19: mol_type = other RNA
agatgcaatatgatggaaa

SEQ ID NO: 733 - RNA, 19 nt, synthetic construct
  source 1..19: mol_type = other RNA
gatgcaatatgatggaaag

SEQ ID NO: 734 - RNA, 19 nt, synthetic construct
  source 1..19: mol_type = other RNA
atgcaatatgatggaaaga

SEQ ID NO: 735 - RNA, 19 nt, synthetic construct
  source 1..19: mol_type = other RNA
tgcaatatgatggaaagag

SEQ ID NO: 736 - RNA, 19 nt, synthetic construct
  source 1..19: mol_type = other RNA
gcaatatgatggaaagaga

SEQ ID NO: 737 - RNA, 19 nt, synthetic construct
  source 1..19: mol_type = other RNA
caatatgatggaaagagac

SEQ ID NO: 738 - RNA, 19 nt, synthetic construct
  source 1..19: mol_type = other RNA
aatatgatggaaagagact

SEQ ID NO: 739 - RNA, 19 nt, synthetic construct
  source 1..19: mol_type = other RNA
atatgatggaaagagacta

SEQ ID NO: 740 - RNA, 19 nt, synthetic construct
  source 1..19: mol_type = other RNA
tatgatggaaagagactaa

SEQ ID NO: 741 - RNA, 19 nt, synthetic construct
  source 1..19: mol_type = other RNA
atgatggaaagagactaaa

SEQ ID NO: 742 - RNA, 19 nt, synthetic construct
  source 1..19: mol_type = other RNA
tgatggaaagagactaaat

SEQ ID NO: 743 - RNA, 19 nt, synthetic construct
  source 1..19: mol_type = other RNA
gatggaaagagactaaatg

SEQ ID NO: 744 - RNA, 19 nt, synthetic construct
  source 1..19: mol_type = other RNA
atggaaagagactaaatgt

SEQ ID NO: 745 - RNA, 19 nt, synthetic construct
  source 1..19: mol_type = other RNA
tggaaagagactaaatgtt

SEQ ID NO: 746 - RNA, 19 nt, synthetic construct
  source 1..19: mol_type = other RNA
ggaaagagactaaatgttg

SEQ ID NO: 747 - RNA, 19 nt, synthetic construct
  source 1..19: mol_type = other RNA
gaaagagactaaatgttga

SEQ ID NO: 748 - RNA, 19 nt, synthetic construct
  source 1..19: mol_type = other RNA
aaagagactaaatgttgat

SEQ ID NO: 749 - RNA, 19 nt, synthetic construct
  source 1..19: mol_type = other RNA
aagagactaaatgttgatg

SEQ ID NO: 750 - RNA, 19 nt, synthetic construct
  source 1..19: mol_type = other RNA
agagactaaatgttgatgt

SEQ ID NO: 751 - RNA, 19 nt, synthetic construct
  source 1..19: mol_type = other RNA
gagactaaatgttgatgtc

SEQ ID NO: 752 - RNA, 19 nt, synthetic construct
  source 1..19: mol_type = other RNA
agactaaatgttgatgtcg

SEQ ID NO: 753 - RNA, 19 nt, synthetic construct
  source 1..19: mol_type = other RNA
gactaaatgttgatgtcga

SEQ ID NO: 754 - RNA, 19 nt, synthetic construct
  source 1..19: mol_type = other RNA
actaaatgttgatgtcgac

SEQ ID NO: 755 - RNA, 19 nt, synthetic construct
  source 1..19: mol_type = other RNA
ctaaatgttgatgtcgaca

SEQ ID NO: 756 - RNA, 19 nt, synthetic construct
  source 1..19: mol_type = other RNA
taaatgttgatgtcgacag

SEQ ID NO: 757 - RNA, 19 nt, synthetic construct
  source 1..19: mol_type = other RNA
aaatgttgatgtcgacagt

SEQ ID NO: 758 - RNA, 19 nt, synthetic construct
  source 1..19: mol_type = other RNA
aatgttgatgtcgacagta

SEQ ID NO: 759 - RNA, 19 nt, synthetic construct
  source 1..19: mol_type = other RNA
atgttgatgtcgacagtac

SEQ ID NO: 760 - RNA, 19 nt, synthetic construct
  source 1..19: mol_type = other RNA
tgttgatgtcgacagtact

SEQ ID NO: 761 - RNA, 19 nt, synthetic construct
  source 1..19: mol_type = other RNA
gttgatgtcgacagtactg

SEQ ID NO: 762 - RNA, 19 nt, synthetic construct
  source 1..19: mol_type = other RNA
ttgatgtcgacagtactgt

SEQ ID NO: 763 - RNA, 19 nt, synthetic construct
  source 1..19: mol_type = other RNA
tgatgtcgacagtactgta

SEQ ID NO: 764 - RNA, 19 nt, synthetic construct
  source 1..19: mol_type = other RNA
gatgtcgacagtactgtat

SEQ ID NO: 765 - RNA, 19 nt, synthetic construct
  source 1..19: mol_type = other RNA
atgtcgacagtactgtatg

SEQ ID NO: 766 - RNA, 19 nt, synthetic construct
  source 1..19: mol_type = other RNA
tgtcgacagtactgtatgg

SEQ ID NO: 767 - RNA, 19 nt, synthetic construct
  source 1..19: mol_type = other RNA
gtcgacagtactgtatggt

SEQ ID NO: 768 - RNA, 19 nt, synthetic construct
  source 1..19: mol_type = other RNA
tcgacagtactgtatggtg

SEQ ID NO: 769 - RNA, 19 nt, synthetic construct
  source 1..19: mol_type = other RNA
cgacagtactgtatggtgc

SEQ ID NO: 770 - RNA, 19 nt, synthetic construct
  source 1..19: mol_type = other RNA
gacagtactgtatggtgct

SEQ ID NO: 771 - RNA, 19 nt, synthetic construct
  source 1..19: mol_type = other RNA
acagtactgtatggtgctc

SEQ ID NO: 772 - RNA, 19 nt, synthetic construct
  source 1..19: mol_type = other RNA
cagtactgtatggtgctcc

SEQ ID NO: 773 - RNA, 19 nt, synthetic construct
  source 1..19: mol_type = other RNA
agtactgtatggtgctccg

SEQ ID NO: 774 - RNA, 19 nt, synthetic construct
  source 1..19: mol_type = other RNA
gtactgtatggtgctccgg

SEQ ID NO: 775 - RNA, 19 nt, synthetic construct
  source 1..19: mol_type = other RNA
tactgtatggtgctccgga

SEQ ID NO: 776 - RNA, 19 nt, synthetic construct
  source 1..19: mol_type = other RNA
actgtatggtgctccggag

SEQ ID NO: 777 - RNA, 19 nt, synthetic construct
  source 1..19: mol_type = other RNA
ctgtatggtgctccggaga

SEQ ID NO: 778 - RNA, 19 nt, synthetic construct
  source 1..19: mol_type = other RNA
tgtatggtgctccggagat

SEQ ID NO: 779 - RNA, 19 nt, synthetic construct
  source 1..19: mol_type = other RNA
gtatggtgctccggagatg

SEQ ID NO: 780 - RNA, 19 nt, synthetic construct
  source 1..19: mol_type = other RNA
tatggtgctccggagatgg

SEQ ID NO: 781 - RNA, 19 nt, synthetic construct
  source 1..19: mol_type = other RNA
atggtgctccggagatgga

SEQ ID NO: 782 - RNA, 19 nt, synthetic construct
  source 1..19: mol_type = other RNA
tggtgctccggagatggac

SEQ ID NO: 783 - RNA, 19 nt, synthetic construct
  source 1..19: mol_type = other RNA
ggtgctccggagatggaca

SEQ ID NO: 784 - RNA, 19 nt, synthetic construct
  source 1..19: mol_type = other RNA
gtgctccggagatggacag

SEQ ID NO: 785 - RNA, 19 nt, synthetic construct
  source 1..19: mol_type = other RNA
tgctccggagatggacagt

SEQ ID NO: 786 - RNA, 19 nt, synthetic construct
  source 1..19: mol_type = other RNA
gctccggagatggacagta

SEQ ID NO: 787 - RNA, 19 nt, synthetic construct
  source 1..19: mol_type = other RNA
ctccggagatggacagtat

SEQ ID NO: 788 - RNA, 19 nt, synthetic construct
  source 1..19: mol_type = other RNA
tccggagatggacagtatc

SEQ ID NO: 789 - RNA, 19 nt, synthetic construct
  source 1..19: mol_type = other RNA
ccggagatggacagtatct

SEQ ID NO: 790 - RNA, 19 nt, synthetic construct
  source 1..19: mol_type = other RNA
cggagatggacagtatctg

SEQ ID NO: 791 - RNA, 19 nt, synthetic construct
  source 1..19: mol_type = other RNA
ggagatggacagtatctgg

SEQ ID NO: 792 - RNA, 19 nt, synthetic construct
  source 1..19: mol_type = other RNA
gagatggacagtatctgga

SEQ ID NO: 793 - RNA, 19 nt, synthetic construct
  source 1..19: mol_type = other RNA
agatggacagtatctggaa

SEQ ID NO: 794 - RNA, 19 nt, synthetic construct
  source 1..19: mol_type = other RNA
gatggacagtatctggaaa

SEQ ID NO: 795 - RNA, 19 nt, synthetic construct
  source 1..19: mol_type = other RNA
atggacagtatctggaaaa

SEQ ID NO: 796 - RNA, 19 nt, synthetic construct
  source 1..19: mol_type = other RNA
tggacagtatctggaaaaa

SEQ ID NO: 797 - RNA, 19 nt, synthetic construct
  source 1..19: mol_type = other RNA
ggacagtatctggaaaaag

SEQ ID NO: 798 - RNA, 19 nt, synthetic construct
  source 1..19: mol_type = other RNA
gacagtatctggaaaaagt

SEQ ID NO: 799 - RNA, 19 nt, synthetic construct
  source 1..19: mol_type = other RNA
acagtatctggaaaaagtc

SEQ ID NO: 800 - RNA, 19 nt, synthetic construct
  source 1..19: mol_type = other RNA
cagtatctggaaaaagtct

SEQ ID NO: 801 - RNA, 19 nt, synthetic construct
  source 1..19: mol_type = other RNA
agtatctggaaaaagtcta

SEQ ID NO: 802 - RNA, 19 nt, synthetic construct
  source 1..19: mol_type = other RNA
gtatctggaaaaagtctat

SEQ ID NO: 803 - RNA, 19 nt, synthetic construct
  source 1..19: mol_type = other RNA
tatctggaaaaagtctatt

SEQ ID NO: 804 - RNA, 19 nt, synthetic construct
  source 1..19: mol_type = other RNA
atctggaaaaagtctatta

SEQ ID NO: 805 - RNA, 19 nt, synthetic construct
  source 1..19: mol_type = other RNA
tctggaaaaagtctattat

SEQ ID NO: 806 - RNA, 19 nt, synthetic construct
  source 1..19: mol_type = other RNA
ctggaaaaagtctattatg

SEQ ID NO: 807 - RNA, 19 nt, synthetic construct
  source 1..19: mol_type = other RNA
tggaaaaagtctattatga

SEQ ID NO: 808 - RNA, 19 nt, synthetic construct
  source 1..19: mol_type = other RNA
ggaaaaagtctattatgac

SEQ ID NO: 809 - RNA, 19 nt, synthetic construct
  source 1..19: mol_type = other RNA
gaaaaagtctattatgaca

SEQ ID NO: 810 - RNA, 19 nt, synthetic construct
  source 1..19: mol_type = other RNA
aaaaagtctattatgacat

SEQ ID NO: 811 - RNA, 19 nt, synthetic construct
  source 1..19: mol_type = other RNA
aaaagtctattatgacatt

SEQ ID NO: 812 - RNA, 19 nt, synthetic construct
  source 1..19: mol_type = other RNA
aaagtctattatgacattc

SEQ ID NO: 813 - RNA, 19 nt, synthetic construct
  source 1..19: mol_type = other RNA
aagtctattatgacattct

SEQ ID NO: 814 - RNA, 19 nt, synthetic construct
  source 1..19: mol_type = other RNA
agtctattatgacattcta

SEQ ID NO: 815 - RNA, 19 nt, synthetic construct
  source 1..19: mol_type = other RNA
gtctattatgacattctat

SEQ ID NO: 816 - RNA, 19 nt, synthetic construct
  source 1..19: mol_type = other RNA
tctattatgacattctatc

SEQ ID NO: 817 - RNA, 19 nt, synthetic construct
  source 1..19: mol_type = other RNA
ctattatgacattctatct

SEQ ID NO: 818 - RNA, 19 nt, synthetic construct
  source 1..19: mol_type = other RNA
tattatgacattctatctt

SEQ ID NO: 819 - RNA, 19 nt, synthetic construct
  source 1..19: mol_type = other RNA
attatgacattctatcttc

SEQ ID NO: 820 - RNA, 19 nt, synthetic construct
  source 1..19: mol_type = other RNA
ttatgacattctatcttct

SEQ ID NO: 821 - RNA, 19 nt, synthetic construct
  source 1..19: mol_type = other RNA
tatgacattctatcttctt

SEQ ID NO: 822 - RNA, 19 nt, synthetic construct
  source 1..19: mol_type = other RNA
atgacattctatcttcttg

SEQ ID NO: 823 - RNA, 19 nt, synthetic construct
  source 1..19: mol_type = other RNA
tgacattctatcttcttgg

SEQ ID NO: 824 - RNA, 19 nt, synthetic construct
  source 1..19: mol_type = other RNA
gacattctatcttcttggt

SEQ ID NO: 825 - RNA, 19 nt, synthetic construct
  source 1..19: mol_type = other RNA
acattctatcttcttggtt

SEQ ID NO: 826 - RNA, 19 nt, synthetic construct
  source 1..19: mol_type = other RNA
cattctatcttcttggttg

SEQ ID NO: 827 - RNA, 19 nt, synthetic construct
  source 1..19: mol_type = other RNA
attctatcttcttggttga

SEQ ID NO: 828 - RNA, 19 nt, synthetic construct
  source 1..19: mol_type = other RNA
ttctatcttcttggttgag

SEQ ID NO: 829 - RNA, 19 nt, synthetic construct
  source 1..19: mol_type = other RNA
tctatcttcttggttgagg

SEQ ID NO: 830 - RNA, 19 nt, synthetic construct
  source 1..19: mol_type = other RNA
ctatcttcttggttgagga

SEQ ID NO: 831 - RNA, 19 nt, synthetic construct
  source 1..19: mol_type = other RNA
tatcttcttggttgaggat

SEQ ID NO: 832 - RNA, 19 nt, synthetic construct
  source 1..19: mol_type = other RNA
atcttcttggttgaggatt

SEQ ID NO: 833 - RNA, 19 nt, synthetic construct
  source 1..19: mol_type = other RNA
tcttcttggttgaggattg

SEQ ID NO: 834 - RNA, 19 nt, synthetic construct
  source 1..19: mol_type = other RNA
cttcttggttgaggattga

SEQ ID NO: 835 - RNA, 19 nt, synthetic construct
  source 1..19: mol_type = other RNA
ttcttggttgaggattgaa

SEQ ID NO: 836 - RNA, 19 nt, synthetic construct
  source 1..19: mol_type = other RNA
tcttggttgaggattgaaa

SEQ ID NO: 837 - RNA, 19 nt, synthetic construct
  source 1..19: mol_type = other RNA
cttggttgaggattgaaag

SEQ ID NO: 838 - RNA, 19 nt, synthetic construct
  source 1..19: mol_type = other RNA
ttggttgaggattgaaagt

SEQ ID NO: 839 - RNA, 19 nt, synthetic construct
  source 1..19: mol_type = other RNA
tggttgaggattgaaagta

SEQ ID NO: 840 - RNA, 19 nt, synthetic construct
  source 1..19: mol_type = other RNA
ggttgaggattgaaagtat

SEQ ID NO: 841 - RNA, 19 nt, synthetic construct
  source 1..19: mol_type = other RNA
gttgaggattgaaagtatt

SEQ ID NO: 842 - RNA, 19 nt, synthetic construct
  source 1..19: mol_type = other RNA
ttgaggattgaaagtattt

SEQ ID NO: 843 - RNA, 19 nt, synthetic construct
  source 1..19: mol_type = other RNA
tgaggattgaaagtattta

SEQ ID NO: 844 - RNA, 19 nt, synthetic construct
  source 1..19: mol_type = other RNA
gaggattgaaagtatttat

SEQ ID NO: 845 - RNA, 19 nt, synthetic construct
  source 1..19: mol_type = other RNA
aggattgaaagtatttatc

SEQ ID NO: 846 - RNA, 19 nt, synthetic construct
  source 1..19: mol_type = other RNA
ggattgaaagtatttatcg

SEQ ID NO: 847 - RNA, 19 nt, synthetic construct
  source 1..19: mol_type = other RNA
gattgaaagtatttatcga

SEQ ID NO: 848 - RNA, 19 nt, synthetic construct
  source 1..19: mol_type = other RNA
attgaaagtatttatcgag

SEQ ID NO: 849 - RNA, 19 nt, synthetic construct
  source 1..19: mol_type = other RNA
ttgaaagtatttatcgagt

SEQ ID NO: 850 - RNA, 19 nt, synthetic construct
  source 1..19: mol_type = other RNA
tgaaagtatttatcgagtg

SEQ ID NO: 851 - RNA, 19 nt, synthetic construct
  source 1..19: mol_type = other RNA
gaaagtatttatcgagtgc

SEQ ID NO: 852 - RNA, 19 nt, synthetic construct
  source 1..19: mol_type = other RNA
aaagtatttatcgagtgct

SEQ ID NO: 853 - RNA, 19 nt, synthetic construct
  source 1..19: mol_type = other RNA
aagtatttatcgagtgctc

SEQ ID NO: 854 - RNA, 19 nt, synthetic construct
  source 1..19: mol_type = other RNA
agtatttatcgagtgctca

SEQ ID NO: 855 - RNA, 19 nt, synthetic construct
  source 1..19: mol_type = other RNA
gtatttatcgagtgctcaa

SEQ ID NO: 856 - RNA, 19 nt, synthetic construct
  source 1..19: mol_type = other RNA
tatttatcgagtgctcaat

SEQ ID NO: 857 - RNA, 19 nt, synthetic construct
  source 1..19: mol_type = other RNA
atttatcgagtgctcaatg

SEQ ID NO: 858 - RNA, 19 nt, synthetic construct
  source 1..19: mol_type = other RNA
tttatcgagtgctcaatgg

SEQ ID NO: 859 - RNA, 19 nt, synthetic construct
  source 1..19: mol_type = other RNA
ttatcgagtgctcaatggt

SEQ ID NO: 860 - RNA, 19 nt, synthetic construct
  source 1..19: mol_type = other RNA
tatcgagtgctcaatggtg

SEQ ID NO: 861 - RNA, 19 nt, synthetic construct
  source 1..19: mol_type = other RNA
atcgagtgctcaatggtgc

SEQ ID NO: 862 - RNA, 19 nt, synthetic construct
  source 1..19: mol_type = other RNA
tcgagtgctcaatggtgcc

SEQ ID NO: 863 - RNA, 19 nt, synthetic construct
  source 1..19: mol_type = other RNA
cgagtgctcaatggtgccc

SEQ ID NO: 864 - RNA, 19 nt, synthetic construct
  source 1..19: mol_type = other RNA
gagtgctcaatggtgccca

SEQ ID NO: 865 - RNA, 19 nt, synthetic construct
  source 1..19: mol_type = other RNA
agtgctcaatggtgcccag

SEQ ID NO: 866 - RNA, 19 nt, synthetic construct
  source 1..19: mol_type = other RNA
gtgctcaatggtgcccagg

SEQ ID NO: 867 - RNA, 19 nt, synthetic construct
  source 1..19: mol_type = other RNA
tgctcaatggtgcccaggc

SEQ ID NO: 868 - RNA, 19 nt, synthetic construct
  source 1..19: mol_type = other RNA
gctcaatggtgcccaggct

SEQ ID NO: 869 - RNA, 19 nt, synthetic construct
  source 1..19: mol_type = other RNA
ctcaatggtgcccaggctg

SEQ ID NO: 870 - RNA, 19 nt, synthetic construct
  source 1..19: mol_type = other RNA
tcaatggtgcccaggctgg

SEQ ID NO: 871 - RNA, 19 nt, synthetic construct
  source 1..19: mol_type = other RNA
caatggtgcccaggctgga

SEQ ID NO: 872 - RNA, 19 nt, synthetic construct
  source 1..19: mol_type = other RNA
aatggtgcccaggctggag

SEQ ID NO: 873 - RNA, 19 nt, synthetic construct
  source 1..19: mol_type = other RNA
atggtgcccaggctggagt

SEQ ID NO: 874 - RNA, 19 nt, synthetic construct
  source 1..19: mol_type = other RNA
tggtgcccaggctggagtg

SEQ ID NO: 875 - RNA, 19 nt, synthetic construct
  source 1..19: mol_type = other RNA
ggtgcccaggctggagtgc

SEQ ID NO: 876 - RNA, 19 nt, synthetic construct
  source 1..19: mol_type = other RNA
gtgcccaggctggagtgca

SEQ ID NO: 877 - RNA, 19 nt, synthetic construct
  source 1..19: mol_type = other RNA
tgcccaggctggagtgcag

SEQ ID NO: 878 - RNA, 19 nt, synthetic construct
  source 1..19: mol_type = other RNA
gcccaggctggagtgcagt

SEQ ID NO: 879 - RNA, 19 nt, synthetic construct
  source 1..19: mol_type = other RNA
cccaggctggagtgcagtg

SEQ ID NO: 880 - RNA, 19 nt, synthetic construct
  source 1..19: mol_type = other RNA
ccaggctggagtgcagtgg

SEQ ID NO: 881 - RNA, 19 nt, synthetic construct
  source 1..19: mol_type = other RNA
caggctggagtgcagtggc

SEQ ID NO: 882 - RNA, 19 nt, synthetic construct
  source 1..19: mol_type = other RNA
aggctggagtgcagtggcg

SEQ ID NO: 883 - RNA, 19 nt, synthetic construct
  source 1..19: mol_type = other RNA
ggctggagtgcagtggcgt

SEQ ID NO: 884 - RNA, 19 nt, synthetic construct
  source 1..19: mol_type = other RNA
gctggagtgcagtggcgtg

SEQ ID NO: 885 - RNA, 19 nt, synthetic construct
  source 1..19: mol_type = other RNA
ctggagtgcagtggcgtga

SEQ ID NO: 886 - RNA, 19 nt, synthetic construct
  source 1..19: mol_type = other RNA
tggagtgcagtggcgtgat

SEQ ID NO: 887 - RNA, 19 nt, synthetic construct
  source 1..19: mol_type = other RNA
ggagtgcagtggcgtgatc

SEQ ID NO: 888 - RNA, 19 nt, synthetic construct
  source 1..19: mol_type = other RNA
gagtgcagtggcgtgatct

SEQ ID NO: 889 - RNA, 19 nt, synthetic construct
  source 1..19: mol_type = other RNA
agtgcagtggcgtgatctc

SEQ ID NO: 890 - RNA, 19 nt, synthetic construct
  source 1..19: mol_type = other RNA
gtgcagtggcgtgatctcg

SEQ ID NO: 891 - RNA, 19 nt, synthetic construct
  source 1..19: mol_type = other RNA
tgcagtggcgtgatctcgg

SEQ ID NO: 892 - RNA, 19 nt, synthetic construct
  source 1..19: mol_type = other RNA
gcagtggcgtgatctcggc

SEQ ID NO: 893 - RNA, 19 nt, synthetic construct
  source 1..19: mol_type = other RNA
cagtggcgtgatctcggct

SEQ ID NO: 894 - RNA, 19 nt, synthetic construct
  source 1..19: mol_type = other RNA
agtggcgtgatctcggctc

SEQ ID NO: 895 - RNA, 19 nt, synthetic construct
  source 1..19: mol_type = other RNA
gtggcgtgatctcggctcc

SEQ ID NO: 896 - RNA, 19 nt, synthetic construct
  source 1..19: mol_type = other RNA
tggcgtgatctcggctccc

SEQ ID NO: 897 - RNA, 19 nt, synthetic construct
  source 1..19: mol_type = other RNA
ggcgtgatctcggctccct

SEQ ID NO: 898 - RNA, 19 nt, synthetic construct
  source 1..19: mol_type = other RNA
gcgtgatctcggctcccta

SEQ ID NO: 899 - RNA, 19 nt, synthetic construct
  source 1..19: mol_type = other RNA
cgtgatctcggctccctac

SEQ ID NO: 900 - RNA, 19 nt, synthetic construct
  source 1..19: mol_type = other RNA
gtgatctcggctccctaca

SEQ ID NO: 901 - RNA, 19 nt, synthetic construct
  source 1..19: mol_type = other RNA
tgatctcggctccctacaa

SEQ ID NO: 902 - RNA, 19 nt, synthetic construct
  source 1..19: mol_type = other RNA
gatctcggctccctacaac

SEQ ID NO: 903 - RNA, 19 nt, synthetic construct
  source 1..19: mol_type = other RNA
atctcggctccctacaacc

SEQ ID NO: 904 - RNA, 19 nt, synthetic construct
  source 1..19: mol_type = other RNA
tctcggctccctacaacct

SEQ ID NO: 905 - RNA, 19 nt, synthetic construct
  source 1..19: mol_type = other RNA
ctcggctccctacaacctc

SEQ ID NO: 906 - RNA, 19 nt, synthetic construct
  source 1..19: mol_type = other RNA
tcggctccctacaacctcc

SEQ ID NO: 907 - RNA, 19 nt, synthetic construct
  source 1..19: mol_type = other RNA
cggctccctacaacctcca

SEQ ID NO: 908 - RNA, 19 nt, synthetic construct
  source 1..19: mol_type = other RNA
ggctccctacaacctccac

SEQ ID NO: 909 - RNA, 19 nt, synthetic construct
  source 1..19: mol_type = other RNA
gctccctacaacctccacc

SEQ ID NO: 910 - RNA, 19 nt, synthetic construct
  source 1..19: mol_type = other RNA
ctccctacaacctccacct

SEQ ID NO: 911 - RNA, 19 nt, synthetic construct
  source 1..19: mol_type = other RNA
tccctacaacctccacctc

SEQ ID NO: 912 - RNA, 19 nt, synthetic construct
  source 1..19: mol_type = other RNA
ccctacaacctccacctcc

SEQ ID NO: 913 - RNA, 19 nt, synthetic construct
  source 1..19: mol_type = other RNA
cctacaacctccacctccc

SEQ ID NO: 914 - RNA, 19 nt, synthetic construct
  source 1..19: mol_type = other RNA
ctacaacctccacctccca

SEQ ID NO: 915 - RNA, 19 nt, synthetic construct
  source 1..19: mol_type = other RNA
tacaacctccacctcccag

SEQ ID NO: 916 - RNA, 19 nt, synthetic construct
  source 1..19: mol_type = other RNA
acaacctccacctcccagc

SEQ ID NO: 917 - RNA, 19 nt, synthetic construct
  source 1..19: mol_type = other RNA
caacctccacctcccagcc

SEQ ID NO: 918 - RNA, 19 nt, synthetic construct
  source 1..19: mol_type = other RNA
aacctccacctcccagccg

SEQ ID NO: 919 - RNA, 19 nt, synthetic construct
  source 1..19: mol_type = other RNA
acctccacctcccagccgc

SEQ ID NO: 920 - RNA, 19 nt, synthetic construct
  source 1..19: mol_type = other RNA
cctccacctcccagccgcc

SEQ ID NO: 921 - RNA, 19 nt, synthetic construct
  source 1..19: mol_type = other RNA
ctccacctcccagccgcct

SEQ ID NO: 922 - RNA, 19 nt, synthetic construct
  source 1..19: mol_type = other RNA
tccacctcccagccgcctg

SEQ ID NO: 923 - RNA, 19 nt, synthetic construct
  source 1..19: mol_type = other RNA
ccacctcccagccgcctgc

SEQ ID NO: 924 - RNA, 19 nt, synthetic construct
  source 1..19: mol_type = other RNA
cacctcccagccgcctgcc

SEQ ID NO: 925 - RNA, 19 nt, synthetic construct
  source 1..19: mol_type = other RNA
acctcccagccgcctgcct

SEQ ID NO: 926 - RNA, 19 nt, synthetic construct
  source 1..19: mol_type = other RNA
cctcccagccgcctgcctt

SEQ ID NO: 927 - RNA, 19 nt, synthetic construct
  source 1..19: mol_type = other RNA
ctcccagccgcctgccttg

SEQ ID NO: 928 - RNA, 19 nt, synthetic construct
  source 1..19: mol_type = other RNA
tcccagccgcctgccttgg

SEQ ID NO: 929 - RNA, 19 nt, synthetic construct
  source 1..19: mol_type = other RNA
cccagccgcctgccttggc

SEQ ID NO: 930 - RNA, 19 nt, synthetic construct
  source 1..19: mol_type = other RNA
ccagccgcctgccttggcc

SEQ ID NO: 931 - RNA, 19 nt, synthetic construct
  source 1..19: mol_type = other RNA
cagccgcctgccttggcct

SEQ ID NO: 932 - RNA, 19 nt, synthetic construct
  source 1..19: mol_type = other RNA
agccgcctgccttggcctc

SEQ ID NO: 933 - RNA, 19 nt, synthetic construct
  source 1..19: mol_type = other RNA
gccgcctgccttggcctcc

SEQ ID NO: 934 - RNA, 19 nt, synthetic construct
  source 1..19: mol_type = other RNA
ccgcctgccttggcctccc

SEQ ID NO: 935 - RNA, 19 nt, synthetic construct
  source 1..19: mol_type = other RNA
cgcctgccttggcctccca

SEQ ID NO: 936 - RNA, 19 nt, synthetic construct
  source 1..19: mol_type = other RNA
gcctgccttggcctcccaa

SEQ ID NO: 937 - RNA, 19 nt, synthetic construct
  source 1..19: mol_type = other RNA
cctgccttggcctcccaaa

SEQ ID NO: 938 - RNA, 19 nt, synthetic construct
  source 1..19: mol_type = other RNA
ctgccttggcctcccaaag

SEQ ID NO: 939 - RNA, 19 nt, synthetic construct
  source 1..19: mol_type = other RNA
tgccttggcctcccaaagt

SEQ ID NO: 940 - RNA, 19 nt, synthetic construct
  source 1..19: mol_type = other RNA
gccttggcctcccaaagtg

SEQ ID NO: 941 - RNA, 19 nt, synthetic construct
  source 1..19: mol_type = other RNA
ccttggcctcccaaagtgc

SEQ ID NO: 942 - RNA, 19 nt, synthetic construct
  source 1..19: mol_type = other RNA
cttggcctcccaaagtgcc

SEQ ID NO: 943 - RNA, 19 nt, synthetic construct
  source 1..19: mol_type = other RNA
ttggcctcccaaagtgccg

SEQ ID NO: 944 - RNA, 19 nt, synthetic construct
  source 1..19: mol_type = other RNA
tggcctcccaaagtgccga

SEQ ID NO: 945 - RNA, 19 nt, synthetic construct
  source 1..19: mol_type = other RNA
ggcctcccaaagtgccgag

SEQ ID NO: 946 - RNA, 19 nt, synthetic construct
  source 1..19: mol_type = other RNA
gcctcccaaagtgccgaga

SEQ ID NO: 947 - RNA, 19 nt, synthetic construct
  source 1..19: mol_type = other RNA
cctcccaaagtgccgagag

SEQ ID NO: 948 - RNA, 19 nt, synthetic construct
  source 1..19: mol_type = other RNA
ctcccaaagtgccgagagt

SEQ ID NO: 949 - RNA, 19 nt, synthetic construct
  source 1..19: mol_type = other RNA
tcccaaagtgccgagagtg

SEQ ID NO: 950 - RNA, 19 nt, synthetic construct
  source 1..19: mol_type = other RNA
cccaaagtgccgagagtgc

SEQ ID NO: 951 - RNA, 19 nt, synthetic construct
  source 1..19: mol_type = other RNA
ccaaagtgccgagagtgca

SEQ ID NO: 952 - RNA, 19 nt, synthetic construct
  source 1..19: mol_type = other RNA
caaagtgccgagagtgcag

SEQ ID NO: 953 - RNA, 19 nt, synthetic construct
  source 1..19: mol_type = other RNA
aaagtgccgagagtgcagc

SEQ ID NO: 954 - RNA, 19 nt, synthetic construct
  source 1..19: mol_type = other RNA
aagtgccgagagtgcagcc

SEQ ID NO: 955 - RNA, 19 nt, synthetic construct
  source 1..19: mol_type = other RNA
agtgccgagagtgcagcct

SEQ ID NO: 956 - RNA, 19 nt, synthetic construct
  source 1..19: mol_type = other RNA
gtgccgagagtgcagcctc

SEQ ID NO: 957 - RNA, 19 nt, synthetic construct
  source 1..19: mol_type = other RNA
tgccgagagtgcagcctct

SEQ ID NO: 958 - RNA, 19 nt, synthetic construct
  source 1..19: mol_type = other RNA
gccgagagtgcagcctctg

SEQ ID NO: 959 - RNA, 19 nt, synthetic construct
  source 1..19: mol_type = other RNA
ccgagagtgcagcctctgc

SEQ ID NO: 960 - RNA, 19 nt, synthetic construct
  source 1..19: mol_type = other RNA
cgagagtgcagcctctgcc

SEQ ID NO: 961 - RNA, 19 nt, synthetic construct
  source 1..19: mol_type = other RNA
gagagtgcagcctctgccc

SEQ ID NO: 962 - RNA, 19 nt, synthetic construct
  source 1..19: mol_type = other RNA
agagtgcagcctctgcccg

SEQ ID NO: 963 - RNA, 19 nt, synthetic construct
  source 1..19: mol_type = other RNA
gagtgcagcctctgcccgg

SEQ ID NO: 964 - RNA, 19 nt, synthetic construct
  source 1..19: mol_type = other RNA
agtgcagcctctgcccggc

SEQ ID NO: 965 - RNA, 19 nt, synthetic construct
  source 1..19: mol_type = other RNA
gtgcagcctctgcccggcc

SEQ ID NO: 966 - RNA, 19 nt, synthetic construct
  source 1..19: mol_type = other RNA
tgcagcctctgcccggccg

SEQ ID NO: 967 - RNA, 19 nt, synthetic construct
  source 1..19: mol_type = other RNA
gcagcctctgcccggccgc

SEQ ID NO: 968 - RNA, 19 nt, synthetic construct
  source 1..19: mol_type = other RNA
cagcctctgcccggccgcc

SEQ ID NO: 969 - RNA, 19 nt, synthetic construct
  source 1..19: mol_type = other RNA
agcctctgcccggccgcca

SEQ ID NO: 970 - RNA, 19 nt, synthetic construct
  source 1..19: mol_type = other RNA
gcctctgcccggccgccac

SEQ ID NO: 971 - RNA, 19 nt, synthetic construct
  source 1..19: mol_type = other RNA
cctctgcccggccgccacc

SEQ ID NO: 972 - RNA, 19 nt, synthetic construct
  source 1..19: mol_type = other RNA
ctctgcccggccgccaccc

SEQ ID NO: 973 - RNA, 19 nt, synthetic construct
  source 1..19: mol_type = other RNA
tctgcccggccgccacccc

SEQ ID NO: 974 - RNA, 19 nt, synthetic construct
  source 1..19: mol_type = other RNA
ctgcccggccgccaccccg

SEQ ID NO: 975 - RNA, 19 nt, synthetic construct
  source 1..19: mol_type = other RNA
tgcccggccgccaccccgt

SEQ ID NO: 976 - RNA, 19 nt, synthetic construct
  source 1..19: mol_type = other RNA
gcccggccgccaccccgtc

SEQ ID NO: 977 - RNA, 19 nt, synthetic construct
  source 1..19: mol_type = other RNA
cccggccgccaccccgtct

SEQ ID NO: 978 - RNA, 19 nt, synthetic construct
  source 1..19: mol_type = other RNA
ccggccgccaccccgtctg

SEQ ID NO: 979 - RNA, 19 nt, synthetic construct
  source 1..19: mol_type = other RNA
cggccgccaccccgtctgg

SEQ ID NO: 980 - RNA, 19 nt, synthetic construct
  source 1..19: mol_type = other RNA
ggccgccaccccgtctggg

SEQ ID NO: 981 - RNA, 19 nt, synthetic construct
  source 1..19: mol_type = other RNA
gccgccaccccgtctggga

SEQ ID NO: 982 - RNA, 19 nt, synthetic construct
  source 1..19: mol_type = other RNA
ccgccaccccgtctgggaa

SEQ ID NO: 983 - RNA, 19 nt, synthetic construct
  source 1..19: mol_type = other RNA
cgccaccccgtctgggaag

SEQ ID NO: 984 - RNA, 19 nt, synthetic construct
  source 1..19: mol_type = other RNA
gccaccccgtctgggaagt

SEQ ID NO: 985 - RNA, 19 nt, synthetic construct
  source 1..19: mol_type = other RNA
ccaccccgtctgggaagtg

SEQ ID NO: 986 - RNA, 19 nt, synthetic construct
  source 1..19: mol_type = other RNA
caccccgtctgggaagtga

SEQ ID NO: 987 - RNA, 19 nt, synthetic construct
  source 1..19: mol_type = other RNA
accccgtctgggaagtgag

SEQ ID NO: 988 - RNA, 19 nt, synthetic construct
  source 1..19: mol_type = other RNA
ccccgtctgggaagtgagg

SEQ ID NO: 989 - RNA, 19 nt, synthetic construct
  source 1..19: mol_type = other RNA
cccgtctgggaagtgagga

SEQ ID NO: 990 - RNA, 19 nt, synthetic construct
  source 1..19: mol_type = other RNA
ccgtctgggaagtgaggag

SEQ ID NO: 991 - RNA, 19 nt, synthetic construct
  source 1..19: mol_type = other RNA
cgtctgggaagtgaggagc

SEQ ID NO: 992 - RNA, 19 nt, synthetic construct
  source 1..19: mol_type = other RNA
gtctgggaagtgaggagcg

SEQ ID NO: 993 - RNA, 19 nt, synthetic construct
  source 1..19: mol_type = other RNA
tctgggaagtgaggagcgt

SEQ ID NO: 994 - RNA, 19 nt, synthetic construct
  source 1..19: mol_type = other RNA
ctgggaagtgaggagcgtc

SEQ ID NO: 995 - RNA, 19 nt, synthetic construct
  source 1..19: mol_type = other RNA
tgggaagtgaggagcgtct

SEQ ID NO: 996 - RNA, 19 nt, synthetic construct
  source 1..19: mol_type = other RNA
gggaagtgaggagcgtctc

SEQ ID NO: 997 - RNA, 19 nt, synthetic construct
  source 1..19: mol_type = other RNA
ggaagtgaggagcgtctct

SEQ ID NO: 998 - RNA, 19 nt, synthetic construct
  source 1..19: mol_type = other RNA
gaagtgaggagcgtctctg

SEQ ID NO: 999 - RNA, 19 nt, synthetic construct
  source 1..19: mol_type = other RNA
aagtgaggagcgtctctgc

SEQ ID NO: 1000 - RNA, 19 nt, synthetic construct
  source 1..19: mol_type = other RNA
agtgaggagcgtctctgcc

SEQ ID NO: 1001 - RNA, 19 nt, synthetic construct
  source 1..19: mol_type = other RNA
gtgaggagcgtctctgcct

SEQ ID NO: 1002 - RNA, 19 nt, synthetic construct
  source 1..19: mol_type = other RNA
tgaggagcgtctctgcctg

SEQ ID NO: 1003 - RNA, 19 nt, synthetic construct
  source 1..19: mol_type = other RNA
gaggagcgtctctgcctgg

SEQ ID NO: 1004 - RNA, 19 nt, synthetic construct
  source 1..19: mol_type = other RNA
aggagcgtctctgcctggc

SEQ ID NO: 1005 - RNA, 19 nt, synthetic construct
  source 1..19: mol_type = other RNA
ggagcgtctctgcctggcc

SEQ ID NO: 1006 - RNA, 19 nt, synthetic construct
  source 1..19: mol_type = other RNA
gagcgtctctgcctggccg

SEQ ID NO: 1007 - RNA, 19 nt, synthetic construct
  source 1..19: mol_type = other RNA
agcgtctctgcctggccgc

SEQ ID NO: 1008 - RNA, 19 nt, synthetic construct
  source 1..19: mol_type = other RNA
gcgtctctgcctggccgcc

SEQ ID NO: 1009 - RNA, 19 nt, synthetic construct
  source 1..19: mol_type = other RNA
cgtctctgcctggccgcct

SEQ ID NO: 1010 - RNA, 19 nt, synthetic construct
  source 1..19: mol_type = other RNA
gtctctgcctggccgccta

SEQ ID NO: 1011 - RNA, 19 nt, synthetic construct
  source 1..19: mol_type = other RNA
tctctgcctggccgcctat

SEQ ID NO: 1012 - RNA, 19 nt, synthetic construct
  source 1..19: mol_type = other RNA
ctctgcctggccgcctatc

SEQ ID NO: 1013 - RNA, 19 nt, synthetic construct
  source 1..19: mol_type = other RNA
tctgcctggccgcctatcg

SEQ ID NO: 1014 - RNA, 19 nt, synthetic construct
  source 1..19: mol_type = other RNA
ctgcctggccgcctatcgt

SEQ ID NO: 1015 - RNA, 19 nt, synthetic construct
  source 1..19: mol_type = other RNA
tgcctggccgcctatcgtc

SEQ ID NO: 1016 - RNA, 19 nt, synthetic construct
  source 1..19: mol_type = other RNA
gcctggccgcctatcgtct

SEQ ID NO: 1017 - RNA, 19 nt, synthetic construct
  source 1..19: mol_type = other RNA
cctggccgcctatcgtctg

SEQ ID NO: 1018 - RNA, 19 nt, synthetic construct
  source 1..19: mol_type = other RNA
ctggccgcctatcgtctgg

SEQ ID NO: 1019 - RNA, 19 nt, synthetic construct
  source 1..19: mol_type = other RNA
tggccgcctatcgtctggg

SEQ ID NO: 1020 - RNA, 19 nt, synthetic construct
  source 1..19: mol_type = other RNA
ggccgcctatcgtctggga

SEQ ID NO: 1021 - RNA, 19 nt, synthetic construct
  source 1..19: mol_type = other RNA
gccgcctatcgtctgggac

SEQ ID NO: 1022 - RNA, 19 nt, synthetic construct
  source 1..19: mol_type = other RNA
ccgcctatcgtctgggacg

SEQ ID NO: 1023 - RNA, 19 nt, synthetic construct
  source 1..19: mol_type = other RNA
cgcctatcgtctgggacgt

SEQ ID NO: 1024 - RNA, 19 nt, synthetic construct
  source 1..19: mol_type = other RNA
gcctatcgtctgggacgtg

SEQ ID NO: 1025 - RNA, 19 nt, synthetic construct
  source 1..19: mol_type = other RNA
cctatcgtctgggacgtga

SEQ ID NO: 1026 - RNA, 19 nt, synthetic construct
  source 1..19: mol_type = other RNA
ctatcgtctgggacgtgag

SEQ ID NO: 1027 - RNA, 19 nt, synthetic construct
  source 1..19: mol_type = other RNA
tatcgtctgggacgtgagg

SEQ ID NO: 1028 - RNA, 19 nt, synthetic construct
  source 1..19: mol_type = other RNA
atcgtctgggacgtgagga

SEQ ID NO: 1029 - RNA, 19 nt, synthetic construct
  source 1..19: mol_type = other RNA
tcgtctgggacgtgaggag

SEQ ID NO: 1030 - RNA, 19 nt, synthetic construct
  source 1..19: mol_type = other RNA
cgtctgggacgtgaggagc

SEQ ID NO: 1031 - RNA, 19 nt, synthetic construct
  source 1..19: mol_type = other RNA
gtctgggacgtgaggagcc

SEQ ID NO: 1032 - RNA, 19 nt, synthetic construct
  source 1..19: mol_type = other RNA
tctgggacgtgaggagccc

SEQ ID NO: 1033 - RNA, 19 nt, synthetic construct
  source 1..19: mol_type = other RNA
ctgggacgtgaggagcccc

SEQ ID NO: 1034 - RNA, 19 nt, synthetic construct
  source 1..19: mol_type = other RNA
tgggacgtgaggagcccct

SEQ ID NO: 1035 - RNA, 19 nt, synthetic construct
  source 1..19: mol_type = other RNA
gggacgtgaggagcccctc

SEQ ID NO: 1036 - RNA, 19 nt, synthetic construct
  source 1..19: mol_type = other RNA
ggacgtgaggagcccctct

SEQ ID NO: 1037 - RNA, 19 nt, synthetic construct
  source 1..19: mol_type = other RNA
gacgtgaggagcccctctg

SEQ ID NO: 1038 - RNA, 19 nt, synthetic construct
  source 1..19: mol_type = other RNA
acgtgaggagcccctctgc

SEQ ID NO: 1039 - RNA, 19 nt, synthetic construct
  source 1..19: mol_type = other RNA
cgtgaggagcccctctgcc

SEQ ID NO: 1040 - RNA, 19 nt, synthetic construct
  source 1..19: mol_type = other RNA
gtgaggagcccctctgcct

SEQ ID NO: 1041 - RNA, 19 nt, synthetic construct
  source 1..19: mol_type = other RNA
tgaggagcccctctgcctg

SEQ ID NO: 1042 - RNA, 19 nt, synthetic construct
  source 1..19: mol_type = other RNA
gaggagcccctctgcctgg

SEQ ID NO: 1043 - RNA, 19 nt, synthetic construct
  source 1..19: mol_type = other RNA
aggagcccctctgcctggc

SEQ ID NO: 1044 - RNA, 19 nt, synthetic construct
  source 1..19: mol_type = other RNA
ggagcccctctgcctggct

SEQ ID NO: 1045 - RNA, 19 nt, synthetic construct
  source 1..19: mol_type = other RNA
gagcccctctgcctggctg

SEQ ID NO: 1046 - RNA, 19 nt, synthetic construct
  source 1..19: mol_type = other RNA
agcccctctgcctggctgc

SEQ ID NO: 1047 - RNA, 19 nt, synthetic construct
  source 1..19: mol_type = other RNA
gcccctctgcctggctgcc

SEQ ID NO: 1048 - RNA, 19 nt, synthetic construct
  source 1..19: mol_type = other RNA
cccctctgcctggctgccc

SEQ ID NO: 1049 - RNA, 19 nt, synthetic construct
  source 1..19: mol_type = other RNA
ccctctgcctggctgccca

SEQ ID NO: 1050 - RNA, 19 nt, synthetic construct
  source 1..19: mol_type = other RNA
cctctgcctggctgcccag

SEQ ID NO: 1051 - RNA, 19 nt, synthetic construct
  source 1..19: mol_type = other RNA
ctctgcctggctgcccagt

SEQ ID NO: 1052 - RNA, 19 nt, synthetic construct
  source 1..19: mol_type = other RNA
tctgcctggctgcccagtc

SEQ ID NO: 1053 - RNA, 19 nt, synthetic construct
  source 1..19: mol_type = other RNA
ctgcctggctgcccagtct

SEQ ID NO: 1054 - RNA, 19 nt, synthetic construct
  source 1..19: mol_type = other RNA
tgcctggctgcccagtctg

SEQ ID NO: 1055 - RNA, 19 nt, synthetic construct
  source 1..19: mol_type = other RNA
gcctggctgcccagtctgg

SEQ ID NO: 1056 - RNA, 19 nt, synthetic construct
  source 1..19: mol_type = other RNA
cctggctgcccagtctgga

SEQ ID NO: 1057 - RNA, 19 nt, synthetic construct
  source 1..19: mol_type = other RNA
ctggctgcccagtctggaa

SEQ ID NO: 1058 - RNA, 19 nt, synthetic construct
  source 1..19: mol_type = other RNA
tggctgcccagtctggaaa

SEQ ID NO: 1059 - RNA, 19 nt, synthetic construct
  source 1..19: mol_type = other RNA
ggctgcccagtctggaaag

SEQ ID NO: 1060 - RNA, 19 nt, synthetic construct
  source 1..19: mol_type = other RNA
gctgcccagtctggaaagt

SEQ ID NO: 1061 - RNA, 19 nt, synthetic construct
  source 1..19: mol_type = other RNA
ctgcccagtctggaaagtg

SEQ ID NO: 1062 - RNA, 19 nt, synthetic construct
  source 1..19: mol_type = other RNA
tgcccagtctggaaagtga

SEQ ID NO: 1063 - RNA, 19 nt, synthetic construct
  source 1..19: mol_type = other RNA
gcccagtctggaaagtgag

SEQ ID NO: 1064 - RNA, 19 nt, synthetic construct
  source 1..19: mol_type = other RNA
cccagtctggaaagtgagg

SEQ ID NO: 1065 - RNA, 19 nt, synthetic construct
  source 1..19: mol_type = other RNA
ccagtctggaaagtgagga

SEQ ID NO: 1066 - RNA, 19 nt, synthetic construct
  source 1..19: mol_type = other RNA
cagtctggaaagtgaggag

SEQ ID NO: 1067 - RNA, 19 nt, synthetic construct
  source 1..19: mol_type = other RNA
agtctggaaagtgaggagc

SEQ ID NO: 1068 - RNA, 19 nt, synthetic construct
  source 1..19: mol_type = other RNA
gtctggaaagtgaggagcg

SEQ ID NO: 1069 - RNA, 19 nt, synthetic construct
  source 1..19: mol_type = other RNA
tctggaaagtgaggagcgt

SEQ ID NO: 1070 - RNA, 19 nt, synthetic construct
  source 1..19: mol_type = other RNA
ctggaaagtgaggagcgtc

SEQ ID NO: 1071 - RNA, 19 nt, synthetic construct
  source 1..19: mol_type = other RNA
tggaaagtgaggagcgtct

SEQ ID NO: 1072 - RNA, 19 nt, synthetic construct
  source 1..19: mol_type = other RNA
ggaaagtgaggagcgtctc

SEQ ID NO: 1073 - RNA, 19 nt, synthetic construct
  source 1..19: mol_type = other RNA
gaaagtgaggagcgtctct

SEQ ID NO: 1074 - RNA, 19 nt, synthetic construct
  source 1..19: mol_type = other RNA
aaagtgaggagcgtctctg

SEQ ID NO: 1075 - RNA, 19 nt, synthetic construct
  source 1..19: mol_type = other RNA
aagtgaggagcgtctctgc

SEQ ID NO: 1076 - RNA, 19 nt, synthetic construct
  source 1..19: mol_type = other RNA
agtgaggagcgtctctgcc

SEQ ID NO: 1077 - RNA, 19 nt, synthetic construct
  source 1..19: mol_type = other RNA
gtgaggagcgtctctgccc

SEQ ID NO: 1078 - RNA, 19 nt, synthetic construct
  source 1..19: mol_type = other RNA
tgaggagcgtctctgcccg

SEQ ID NO: 1079 - RNA, 19 nt, synthetic construct
  source 1..19: mol_type = other RNA
gaggagcgtctctgcccgg

SEQ ID NO: 1080 - RNA, 19 nt, synthetic construct
  source 1..19: mol_type = other RNA
aggagcgtctctgcccggc

SEQ ID NO: 1081 - RNA, 19 nt, synthetic construct
  source 1..19: mol_type = other RNA
ggagcgtctctgcccggct

SEQ ID NO: 1082 - RNA, 19 nt, synthetic construct
  source 1..19: mol_type = other RNA
gagcgtctctgcccggctg

SEQ ID NO: 1083 - RNA, 19 nt, synthetic construct
  source 1..19: mol_type = other RNA
agcgtctctgcccggctgc

SEQ ID NO: 1084 - RNA, 19 nt, synthetic construct
  source 1..19: mol_type = other RNA
gcgtctctgcccggctgcc

SEQ ID NO: 1085 - RNA, 19 nt, synthetic construct
  source 1..19: mol_type = other RNA
cgtctctgcccggctgcca

SEQ ID NO: 1086 - RNA, 19 nt, synthetic construct
  source 1..19: mol_type = other RNA
gtctctgcccggctgccat

SEQ ID NO: 1087 - RNA, 19 nt, synthetic construct
  source 1..19: mol_type = other RNA
tctctgcccggctgccatc

SEQ ID NO: 1088 - RNA, 19 nt, synthetic construct
  source 1..19: mol_type = other RNA
ctctgcccggctgccatcc

SEQ ID NO: 1089 - RNA, 19 nt, synthetic construct
  source 1..19: mol_type = other RNA
tctgcccggctgccatccc

SEQ ID NO: 1090 - RNA, 19 nt, synthetic construct
  source 1..19: mol_type = other RNA
ctgcccggctgccatccca

SEQ ID NO: 1091 - RNA, 19 nt, synthetic construct
  source 1..19: mol_type = other RNA
tgcccggctgccatcccat

SEQ ID NO: 1092 - RNA, 19 nt, synthetic construct
  source 1..19: mol_type = other RNA
gcccggctgccatcccatc

SEQ ID NO: 1093 - RNA, 19 nt, synthetic construct
  source 1..19: mol_type = other RNA
cccggctgccatcccatct

SEQ ID NO: 1094 - RNA, 19 nt, synthetic construct
  source 1..19: mol_type = other RNA
ccggctgccatcccatcta

SEQ ID NO: 1095 - RNA, 19 nt, synthetic construct
  source 1..19: mol_type = other RNA
cggctgccatcccatctag

SEQ ID NO: 1096 - RNA, 19 nt, synthetic construct
  source 1..19: mol_type = other RNA
ggctgccatcccatctagg

SEQ ID NO: 1097 - RNA, 19 nt, synthetic construct
  source 1..19: mol_type = other RNA
gctgccatcccatctagga

SEQ ID NO: 1098 - RNA, 19 nt, synthetic construct
  source 1..19: mol_type = other RNA
ctgccatcccatctaggaa

SEQ ID NO: 1099 - RNA, 19 nt, synthetic construct
  source 1..19: mol_type = other RNA
tgccatcccatctaggaag

SEQ ID NO: 1100 - RNA, 19 nt, synthetic construct
  source 1..19: mol_type = other RNA
gccatcccatctaggaagt

SEQ ID NO: 1101 - RNA, 19 nt, synthetic construct
  source 1..19: mol_type = other RNA
ccatcccatctaggaagtg

SEQ ID NO: 1102 - RNA, 19 nt, synthetic construct
  source 1..19: mol_type = other RNA
catcccatctaggaagtgg

SEQ ID NO: 1103 - RNA, 19 nt, synthetic construct
  source 1..19: mol_type = other RNA
atcccatctaggaagtggg

SEQ ID NO: 1104 - RNA, 19 nt, synthetic construct
  source 1..19: mol_type = other RNA
tcccatctaggaagtgggg

SEQ ID NO: 1105 - RNA, 19 nt, synthetic construct
  source 1..19: mol_type = other RNA
cccatctaggaagtgggga

SEQ ID NO: 1106 - RNA, 19 nt, synthetic construct
  source 1..19: mol_type = other RNA
ccatctaggaagtggggag

SEQ ID NO: 1107 - RNA, 19 nt, synthetic construct
  source 1..19: mol_type = other RNA
catctaggaagtggggagc

SEQ ID NO: 1108 - RNA, 19 nt, synthetic construct
  source 1..19: mol_type = other RNA
atctaggaagtggggagcg

SEQ ID NO: 1109 - RNA, 19 nt, synthetic construct
  source 1..19: mol_type = other RNA
tctaggaagtggggagcgc

SEQ ID NO: 1110 - RNA, 19 nt, synthetic construct
  source 1..19: mol_type = other RNA
ctaggaagtggggagcgcc

SEQ ID NO: 1111 - RNA, 19 nt, synthetic construct
  source 1..19: mol_type = other RNA
taggaagtggggagcgcct

SEQ ID NO: 1112 - RNA, 19 nt, synthetic construct
  source 1..19: mol_type = other RNA
aggaagtggggagcgcctc

SEQ ID NO: 1113 - RNA, 19 nt, synthetic construct
  source 1..19: mol_type = other RNA
ggaagtggggagcgcctct

SEQ ID NO: 1114 - RNA, 19 nt, synthetic construct
  source 1..19: mol_type = other RNA
gaagtggggagcgcctctt

SEQ ID NO: 1115 - RNA, 19 nt, synthetic construct
  source 1..19: mol_type = other RNA
aagtggggagcgcctcttc

SEQ ID NO: 1116 - RNA, 19 nt, synthetic construct
  source 1..19: mol_type = other RNA
agtggggagcgcctcttcc

SEQ ID NO: 1117 - RNA, 19 nt, synthetic construct
  source 1..19: mol_type = other RNA
gtggggagcgcctcttccc

SEQ ID NO: 1118 - RNA, 19 nt, synthetic construct
  source 1..19: mol_type = other RNA
tggggagcgcctcttcccg

SEQ ID NO: 1119 - RNA, 19 nt, synthetic construct
  source 1..19: mol_type = other RNA
ggggagcgcctcttcccgg

SEQ ID NO: 1120 - RNA, 19 nt, synthetic construct
  source 1..19: mol_type = other RNA
gggagcgcctcttcccggc

SEQ ID NO: 1121 - RNA, 19 nt, synthetic construct
  source 1..19: mol_type = other RNA
ggagcgcctcttcccggcc

SEQ ID NO: 1122 - RNA, 19 nt, synthetic construct
  source 1..19: mol_type = other RNA
gagcgcctcttcccggcca

SEQ ID NO: 1123 - RNA, 19 nt, synthetic construct
  source 1..19: mol_type = other RNA
agcgcctcttcccggccac

SEQ ID NO: 1124 - RNA, 19 nt, synthetic construct
  source 1..19: mol_type = other RNA
gcgcctcttcccggccacc

SEQ ID NO: 1125 - RNA, 19 nt, synthetic construct
  source 1..19: mol_type = other RNA
cgcctcttcccggccacca

SEQ ID NO: 1126 - RNA, 19 nt, synthetic construct
  source 1..19: mol_type = other RNA
gcctcttcccggccaccat

SEQ ID NO: 1127 - RNA, 19 nt, synthetic construct
  source 1..19: mol_type = other RNA
cctcttcccggccaccatc

SEQ ID NO: 1128 - RNA, 19 nt, synthetic construct
  source 1..19: mol_type = other RNA
ctcttcccggccaccatcc

SEQ ID NO: 1129 - RNA, 19 nt, synthetic construct
  source 1..19: mol_type = other RNA
tcttcccggccaccatccc

SEQ ID NO: 1130 - RNA, 19 nt, synthetic construct
  source 1..19: mol_type = other RNA
cttcccggccaccatccca

SEQ ID NO: 1131 - RNA, 19 nt, synthetic construct
  source 1..19: mol_type = other RNA
ttcccggccaccatcccat

SEQ ID NO: 1132 - RNA, 19 nt, synthetic construct
  source 1..19: mol_type = other RNA
tcccggccaccatcccatc

SEQ ID NO: 1133 - RNA, 19 nt, synthetic construct
  source 1..19: mol_type = other RNA
cccggccaccatcccatct

SEQ ID NO: 1134 - RNA, 19 nt, synthetic construct
  source 1..19: mol_type = other RNA
ccggccaccatcccatctg

SEQ ID NO: 1135 - RNA, 19 nt, synthetic construct
  source 1..19: mol_type = other RNA
cggccaccatcccatctgg

SEQ ID NO: 1136 - RNA, 19 nt, synthetic construct
  source 1..19: mol_type = other RNA
ggccaccatcccatctggg

SEQ ID NO: 1137 - RNA, 19 nt, synthetic construct
  source 1..19: mol_type = other RNA
gccaccatcccatctggga

SEQ ID NO: 1138 - RNA, 19 nt, synthetic construct
  source 1..19: mol_type = other RNA
ccaccatcccatctgggag

SEQ ID NO: 1139 - RNA, 19 nt, synthetic construct
  source 1..19: mol_type = other RNA
caccatcccatctgggagg

SEQ ID NO: 1140 - RNA, 19 nt, synthetic construct
  source 1..19: mol_type = other RNA
accatcccatctgggaggt

SEQ ID NO: 1141 - RNA, 19 nt, synthetic construct
  source 1..19: mol_type = other RNA
ccatcccatctgggaggtg

SEQ ID NO: 1142 - RNA, 19 nt, synthetic construct
  source 1..19: mol_type = other RNA
catcccatctgggaggtga

SEQ ID NO: 1143 - RNA, 19 nt, synthetic construct
  source 1..19: mol_type = other RNA
atcccatctgggaggtgag

SEQ ID NO: 1144 - RNA, 19 nt, synthetic construct
  source 1..19: mol_type = other RNA
tcccatctgggaggtgagg

SEQ ID NO: 1145 - RNA, 19 nt, synthetic construct
  source 1..19: mol_type = other RNA
cccatctgggaggtgagga

SEQ ID NO: 1146 - RNA, 19 nt, synthetic construct
  source 1..19: mol_type = other RNA
ccatctgggaggtgaggag

SEQ ID NO: 1147 - RNA, 19 nt, synthetic construct
  source 1..19: mol_type = other RNA
catctgggaggtgaggagt

SEQ ID NO: 1148 - RNA, 19 nt, synthetic construct
  source 1..19: mol_type = other RNA
atctgggaggtgaggagtg

SEQ ID NO: 1149 - RNA, 19 nt, synthetic construct
  source 1..19: mol_type = other RNA
tctgggaggtgaggagtgt

SEQ ID NO: 1150 - RNA, 19 nt, synthetic construct
  source 1..19: mol_type = other RNA
ctgggaggtgaggagtgtc

SEQ ID NO: 1151 - RNA, 19 nt, synthetic construct
  source 1..19: mol_type = other RNA
tgggaggtgaggagtgtct

SEQ ID NO: 1152 - RNA, 19 nt, synthetic construct
  source 1..19: mol_type = other RNA
gggaggtgaggagtgtctc

SEQ ID NO: 1153 - RNA, 19 nt, synthetic construct
  source 1..19: mol_type = other RNA
ggaggtgaggagtgtctcc

SEQ ID NO: 1154 - RNA, 19 nt, synthetic construct
  source 1..19: mol_type = other RNA
gaggtgaggagtgtctccg

SEQ ID NO: 1155 - RNA, 19 nt, synthetic construct
  source 1..19: mol_type = other RNA
aggtgaggagtgtctccgc

SEQ ID NO: 1156 - RNA, 19 nt, synthetic construct
  source 1..19: mol_type = other RNA
ggtgaggagtgtctccgcc

SEQ ID NO: 1157 - RNA, 19 nt, synthetic construct
  source 1..19: mol_type = other RNA
gtgaggagtgtctccgccc

SEQ ID NO: 1158 - RNA, 19 nt, synthetic construct
  source 1..19: mol_type = other RNA
tgaggagtgtctccgcccg

SEQ ID NO: 1159 - RNA, 19 nt, synthetic construct
  source 1..19: mol_type = other RNA
gaggagtgtctccgcccgg

SEQ ID NO: 1160 - RNA, 19 nt, synthetic construct
  source 1..19: mol_type = other RNA
aggagtgtctccgcccggc

SEQ ID NO: 1161 - RNA, 19 nt, synthetic construct
  source 1..19: mol_type = other RNA
ggagtgtctccgcccggcc

SEQ ID NO: 1162 - RNA, 19 nt, synthetic construct
  source 1..19: mol_type = other RNA
gagtgtctccgcccggccg

SEQ ID NO: 1163 - RNA, 19 nt, synthetic construct
  source 1..19: mol_type = other RNA
agtgtctccgcccggccgc

SEQ ID NO: 1164 - RNA, 19 nt, synthetic construct
  source 1..19: mol_type = other RNA
gtgtctccgcccggccgcc

SEQ ID NO: 1165 - RNA, 19 nt, synthetic construct
  source 1..19: mol_type = other RNA
tgtctccgcccggccgccc

SEQ ID NO: 1166 - RNA, 19 nt, synthetic construct
  source 1..19: mol_type = other RNA
gtctccgcccggccgccca

SEQ ID NO: 1167 - RNA, 19 nt, synthetic construct
  source 1..19: mol_type = other RNA
tctccgcccggccgcccat

SEQ ID NO: 1168 - RNA, 19 nt, synthetic construct
  source 1..19: mol_type = other RNA
ctccgcccggccgcccatc

SEQ ID NO: 1169 - RNA, 19 nt, synthetic construct
  source 1..19: mol_type = other RNA
tccgcccggccgcccatct

SEQ ID NO: 1170 - RNA, 19 nt, synthetic construct
  source 1..19: mol_type = other RNA
ccgcccggccgcccatctt

SEQ ID NO: 1171 - RNA, 19 nt, synthetic construct
  source 1..19: mol_type = other RNA
cgcccggccgcccatcttc

SEQ ID NO: 1172 - RNA, 19 nt, synthetic construct
  source 1..19: mol_type = other RNA
gcccggccgcccatcttct

SEQ ID NO: 1173 - RNA, 19 nt, synthetic construct
  source 1..19: mol_type = other RNA
cccggccgcccatcttctg

SEQ ID NO: 1174 - RNA, 19 nt, synthetic construct
  source 1..19: mol_type = other RNA
ccggccgcccatcttctga

SEQ ID NO: 1175 - RNA, 19 nt, synthetic construct
  source 1..19: mol_type = other RNA
cggccgcccatcttctgag

SEQ ID NO: 1176 - RNA, 19 nt, synthetic construct
  source 1..19: mol_type = other RNA
ggccgcccatcttctgaga

SEQ ID NO: 1177 - RNA, 19 nt, synthetic construct
  source 1..19: mol_type = other RNA
gccgcccatcttctgagat

SEQ ID NO: 1178 - RNA, 19 nt, synthetic construct
  source 1..19: mol_type = other RNA
ccgcccatcttctgagatg

SEQ ID NO: 1179 - RNA, 19 nt, synthetic construct
  source 1..19: mol_type = other RNA
cgcccatcttctgagatgt

SEQ ID NO: 1180 - RNA, 19 nt, synthetic construct
  source 1..19: mol_type = other RNA
gcccatcttctgagatgtg

SEQ ID NO: 1181 - RNA, 19 nt, synthetic construct
  source 1..19: mol_type = other RNA
cccatcttctgagatgtgg

SEQ ID NO: 1182 - RNA, 19 nt, synthetic construct
  source 1..19: mol_type = other RNA
ccatcttctgagatgtggg

SEQ ID NO: 1183 - RNA, 19 nt, synthetic construct
  source 1..19: mol_type = other RNA
catcttctgagatgtgggg

SEQ ID NO: 1184 - RNA, 19 nt, synthetic construct
  source 1..19: mol_type = other RNA
atcttctgagatgtgggga

SEQ ID NO: 1185 - RNA, 19 nt, synthetic construct
  source 1..19: mol_type = other RNA
tcttctgagatgtggggag

SEQ ID NO: 1186 - RNA, 19 nt, synthetic construct
  source 1..19: mol_type = other RNA
cttctgagatgtggggagc

SEQ ID NO: 1187 - RNA, 19 nt, synthetic construct
  source 1..19: mol_type = other RNA
ttctgagatgtggggagcg

SEQ ID NO: 1188 - RNA, 19 nt, synthetic construct
  source 1..19: mol_type = other RNA
tctgagatgtggggagcgc

SEQ ID NO: 1189 - RNA, 19 nt, synthetic construct
  source 1..19: mol_type = other RNA
ctgagatgtggggagcgcc

SEQ ID NO: 1190 - RNA, 19 nt, synthetic construct
  source 1..19: mol_type = other RNA
tgagatgtggggagcgcct

SEQ ID NO: 1191 - RNA, 19 nt, synthetic construct
  source 1..19: mol_type = other RNA
gagatgtggggagcgcctt

SEQ ID NO: 1192 - RNA, 19 nt, synthetic construct
  source 1..19: mol_type = other RNA
agatgtggggagcgccttt

SEQ ID NO: 1193 - RNA, 19 nt, synthetic construct
  source 1..19: mol_type = other RNA
gatgtggggagcgcctttg

SEQ ID NO: 1194 - RNA, 19 nt, synthetic construct
  source 1..19: mol_type = other RNA
atgtggggagcgcctttgc

SEQ ID NO: 1195 - RNA, 19 nt, synthetic construct
  source 1..19: mol_type = other RNA
tgtggggagcgcctttgcc

SEQ ID NO: 1196 - RNA, 19 nt, synthetic construct
  source 1..19: mol_type = other RNA
gtggggagcgcctttgccc

SEQ ID NO: 1197 - RNA, 19 nt, synthetic construct
  source 1..19: mol_type = other RNA
tggggagcgcctttgcccc

SEQ ID NO: 1198 - RNA, 19 nt, synthetic construct
  source 1..19: mol_type = other RNA
ggggagcgcctttgcccca

SEQ ID NO: 1199 - RNA, 19 nt, synthetic construct
  source 1..19: mol_type = other RNA
gggagcgcctttgccccac

SEQ ID NO: 1200 - RNA, 19 nt, synthetic construct
  source 1..19: mol_type = other RNA
ggagcgcctttgccccacc

SEQ ID NO: 1201 - RNA, 19 nt, synthetic construct
  source 1..19: mol_type = other RNA
gagcgcctttgccccaccg

SEQ ID NO: 1202 - RNA, 19 nt, synthetic construct
  source 1..19: mol_type = other RNA
agcgcctttgccccaccgc

SEQ ID NO: 1203 - RNA, 19 nt, synthetic construct
  source 1..19: mol_type = other RNA
gcgcctttgccccaccgcc

SEQ ID NO: 1204 - RNA, 19 nt, synthetic construct
  source 1..19: mol_type = other RNA
cgcctttgccccaccgccc

SEQ ID NO: 1205 - RNA, 19 nt, synthetic construct
  source 1..19: mol_type = other RNA
gcctttgccccaccgccct

SEQ ID NO: 1206 - RNA, 19 nt, synthetic construct
  source 1..19: mol_type = other RNA
cctttgccccaccgccctg

SEQ ID NO: 1207 - RNA, 19 nt, synthetic construct
  source 1..19: mol_type = other RNA
ctttgccccaccgccctgt

SEQ ID NO: 1208 - RNA, 19 nt, synthetic construct
  source 1..19: mol_type = other RNA
tttgccccaccgccctgtc

SEQ ID NO: 1209 - RNA, 19 nt, synthetic construct
  source 1..19: mol_type = other RNA
ttgccccaccgccctgtct

SEQ ID NO: 1210 - RNA, 19 nt, synthetic construct
  source 1..19: mol_type = other RNA
tgccccaccgccctgtctg

SEQ ID NO: 1211 - RNA, 19 nt, synthetic construct
  source 1..19: mol_type = other RNA
gccccaccgccctgtctgg

SEQ ID NO: 1212 - RNA, 19 nt, synthetic construct
  source 1..19: mol_type = other RNA
ccccaccgccctgtctggg

SEQ ID NO: 1213 - RNA, 19 nt, synthetic construct
  source 1..19: mol_type = other RNA
cccaccgccctgtctggga

SEQ ID NO: 1214 - RNA, 19 nt, synthetic construct
  source 1..19: mol_type = other RNA
ccaccgccctgtctgggat

SEQ ID NO: 1215 - RNA, 19 nt, synthetic construct
  source 1..19: mol_type = other RNA
caccgccctgtctgggatg

SEQ ID NO: 1216 - RNA, 19 nt, synthetic construct
  source 1..19: mol_type = other RNA
accgccctgtctgggatgt

SEQ ID NO: 1217 - RNA, 19 nt, synthetic construct
  source 1..19: mol_type = other RNA
ccgccctgtctgggatgtg

SEQ ID NO: 1218 - RNA, 19 nt, synthetic construct
  source 1..19: mol_type = other RNA
cgccctgtctgggatgtga

SEQ ID NO: 1219 - RNA, 19 nt, synthetic construct
  source 1..19: mol_type = other RNA
gccctgtctgggatgtgag

SEQ ID NO: 1220 - RNA, 19 nt, synthetic construct
  source 1..19: mol_type = other RNA
ccctgtctgggatgtgagg

SEQ ID NO: 1221 - RNA, 19 nt, synthetic construct
  source 1..19: mol_type = other RNA
cctgtctgggatgtgagga

SEQ ID NO: 1222 - RNA, 19 nt, synthetic construct
  source 1..19: mol_type = other RNA
ctgtctgggatgtgaggag

SEQ ID NO: 1223 - RNA, 19 nt, synthetic construct
  source 1..19: mol_type = other RNA
tgtctgggatgtgaggagc

SEQ ID NO: 1224 - RNA, 19 nt, synthetic construct
  source 1..19: mol_type = other RNA
gtctgggatgtgaggagca

SEQ ID NO: 1225 - RNA, 19 nt, synthetic construct
  source 1..19: mol_type = other RNA
tctgggatgtgaggagcac

SEQ ID NO: 1226 - RNA, 19 nt, synthetic construct
  source 1..19: mol_type = other RNA
ctgggatgtgaggagcacc

SEQ ID NO: 1227 - RNA, 19 nt, synthetic construct
  source 1..19: mol_type = other RNA
tgggatgtgaggagcacct

SEQ ID NO: 1228 - RNA, 19 nt, synthetic construct
  source 1..19: mol_type = other RNA
gggatgtgaggagcacctc

SEQ ID NO: 1229 - RNA, 19 nt, synthetic construct
  source 1..19: mol_type = other RNA
ggatgtgaggagcacctct

SEQ ID NO: 1230 - RNA, 19 nt, synthetic construct
  source 1..19: mol_type = other RNA
gatgtgaggagcacctctg

SEQ ID NO: 1231 - RNA, 19 nt, synthetic construct
  source 1..19: mol_type = other RNA
atgtgaggagcacctctgc

SEQ ID NO: 1232 - RNA, 19 nt, synthetic construct
  source 1..19: mol_type = other RNA
tgtgaggagcacctctgcc

SEQ ID NO: 1233 - RNA, 19 nt, synthetic construct
  source 1..19: mol_type = other RNA
gtgaggagcacctctgccc

SEQ ID NO: 1234 - RNA, 19 nt, synthetic construct
  source 1..19: mol_type = other RNA
tgaggagcacctctgcccg

SEQ ID NO: 1235 - RNA, 19 nt, synthetic construct
  source 1..19: mol_type = other RNA
gaggagcacctctgcccgg

SEQ ID NO: 1236 - RNA, 19 nt, synthetic construct
  source 1..19: mol_type = other RNA
aggagcacctctgcccggc

SEQ ID NO: 1237 - RNA, 19 nt, synthetic construct
  source 1..19: mol_type = other RNA
ggagcacctctgcccggcc

SEQ ID NO: 1238 - RNA, 19 nt, synthetic construct
  source 1..19: mol_type = other RNA
gagcacctctgcccggccg

SEQ ID NO: 1239 - RNA, 19 nt, synthetic construct
  source 1..19: mol_type = other RNA
agcacctctgcccggccgc

SEQ ID NO: 1240 - RNA, 19 nt, synthetic construct
  source 1..19: mol_type = other RNA
gcacctctgcccggccgcg

SEQ ID NO: 1241 - RNA, 19 nt, synthetic construct
  source 1..19: mol_type = other RNA
cacctctgcccggccgcga

SEQ ID NO: 1242 - RNA, 19 nt, synthetic construct
  source 1..19: mol_type = other RNA
acctctgcccggccgcgac

SEQ ID NO: 1243 - RNA, 19 nt, synthetic construct
  source 1..19: mol_type = other RNA
cctctgcccggccgcgacc

SEQ ID NO: 1244 - RNA, 19 nt, synthetic construct
  source 1..19: mol_type = other RNA
ctctgcccggccgcgaccc

SEQ ID NO: 1245 - RNA, 19 nt, synthetic construct
  source 1..19: mol_type = other RNA
tctgcccggccgcgacccc

SEQ ID NO: 1246 - RNA, 19 nt, synthetic construct
  source 1..19: mol_type = other RNA
ctgcccggccgcgaccccg

SEQ ID NO: 1247 - RNA, 19 nt, synthetic construct
  source 1..19: mol_type = other RNA
tgcccggccgcgaccccgt

SEQ ID NO: 1248 - RNA, 19 nt, synthetic construct
  source 1..19: mol_type = other RNA
gcccggccgcgaccccgtc

SEQ ID NO: 1249 - RNA, 19 nt, synthetic construct
  source 1..19: mol_type = other RNA
cccggccgcgaccccgtct

SEQ ID NO: 1250 - RNA, 19 nt, synthetic construct
  source 1..19: mol_type = other RNA
ccggccgcgaccccgtctg

SEQ ID NO: 1251 - RNA, 19 nt, synthetic construct
  source 1..19: mol_type = other RNA
cggccgcgaccccgtctgg

SEQ ID NO: 1252 - RNA, 19 nt, synthetic construct
  source 1..19: mol_type = other RNA
ggccgcgaccccgtctggg

SEQ ID NO: 1253 - RNA, 19 nt, synthetic construct
  source 1..19: mol_type = other RNA
gccgcgaccccgtctggga

SEQ ID NO: 1254 - RNA, 19 nt, synthetic construct
  source 1..19: mol_type = other RNA
ccgcgaccccgtctgggag

SEQ ID NO: 1255 - RNA, 19 nt, synthetic construct
  source 1..19: mol_type = other RNA
cgcgaccccgtctgggagg

SEQ ID NO: 1256 - RNA, 19 nt, synthetic construct
  source 1..19: mol_type = other RNA
gcgaccccgtctgggaggt

SEQ ID NO: 1257 - RNA, 19 nt, synthetic construct
  source 1..19: mol_type = other RNA
cgaccccgtctgggaggtg

SEQ ID NO: 1258 - RNA, 19 nt, synthetic construct
  source 1..19: mol_type = other RNA
gaccccgtctgggaggtga

SEQ ID NO: 1259 - RNA, 19 nt, synthetic construct
  source 1..19: mol_type = other RNA
accccgtctgggaggtgag

SEQ ID NO: 1260 - RNA, 19 nt, synthetic construct
  source 1..19: mol_type = other RNA
ccccgtctgggaggtgagg

SEQ ID NO: 1261 - RNA, 19 nt, synthetic construct
  source 1..19: mol_type = other RNA
cccgtctgggaggtgagga

SEQ ID NO: 1262 - RNA, 19 nt, synthetic construct
  source 1..19: mol_type = other RNA
ccgtctgggaggtgaggag

SEQ ID NO: 1263 - RNA, 19 nt, synthetic construct
  source 1..19: mol_type = other RNA
cgtctgggaggtgaggagc

SEQ ID NO: 1264 - RNA, 19 nt, synthetic construct
  source 1..19: mol_type = other RNA
gtctgggaggtgaggagcg

SEQ ID NO: 1265 - RNA, 19 nt, synthetic construct
  source 1..19: mol_type = other RNA
tctgggaggtgaggagcgt

SEQ ID NO: 1266 - RNA, 19 nt, synthetic construct
  source 1..19: mol_type = other RNA
ctgggaggtgaggagcgtc

SEQ ID NO: 1267 - RNA, 19 nt, synthetic construct
  source 1..19: mol_type = other RNA
tgggaggtgaggagcgtct

SEQ ID NO: 1268 - RNA, 19 nt, synthetic construct
  source 1..19: mol_type = other RNA
gggaggtgaggagcgtctc

SEQ ID NO: 1269 - RNA, 19 nt, synthetic construct
  source 1..19: mol_type = other RNA
ggaggtgaggagcgtctct

SEQ ID NO: 1270 - RNA, 19 nt, synthetic construct
  source 1..19: mol_type = other RNA
gaggtgaggagcgtctctg

SEQ ID NO: 1271 - RNA, 19 nt, synthetic construct
  source 1..19: mol_type = other RNA
aggtgaggagcgtctctgc

SEQ ID NO: 1272 - RNA, 19 nt, synthetic construct
  source 1..19: mol_type = other RNA
ggtgaggagcgtctctgcc

SEQ ID NO: 1273 - RNA, 19 nt, synthetic construct
  source 1..19: mol_type = other RNA
gtgaggagcgtctctgccc

SEQ ID NO: 1274 - RNA, 19 nt, synthetic construct
  source 1..19: mol_type = other RNA
tgaggagcgtctctgccca

SEQ ID NO: 1275 - RNA, 19 nt, synthetic construct
  source 1..19: mol_type = other RNA
gaggagcgtctctgcccag

SEQ ID NO: 1276 - RNA, 19 nt, synthetic construct
  source 1..19: mol_type = other RNA
aggagcgtctctgcccagc

SEQ ID NO: 1277 - RNA, 19 nt, synthetic construct
  source 1..19: mol_type = other RNA
ggagcgtctctgcccagcc

SEQ ID NO: 1278 - RNA, 19 nt, synthetic construct
  source 1..19: mol_type = other RNA
gagcgtctctgcccagccg

SEQ ID NO: 1279 - RNA, 19 nt, synthetic construct
  source 1..19: mol_type = other RNA
agcgtctctgcccagccgc

SEQ ID NO: 1280 - RNA, 19 nt, synthetic construct
  source 1..19: mol_type = other RNA
gcgtctctgcccagccgcc

SEQ ID NO: 1281 - RNA, 19 nt, synthetic construct
  source 1..19: mol_type = other RNA
cgtctctgcccagccgccc

SEQ ID NO: 1282 - RNA, 19 nt, synthetic construct
  source 1..19: mol_type = other RNA
gtctctgcccagccgcccc

SEQ ID NO: 1283 - RNA, 19 nt, synthetic construct
  source 1..19: mol_type = other RNA
tctctgcccagccgcccca

SEQ ID NO: 1284 - RNA, 19 nt, synthetic construct
  source 1..19: mol_type = other RNA
ctctgcccagccgccccat

SEQ ID NO: 1285 - RNA, 19 nt, synthetic construct
  source 1..19: mol_type = other RNA
tctgcccagccgccccatc

SEQ ID NO: 1286 - RNA, 19 nt, synthetic construct
  source 1..19: mol_type = other RNA
ctgcccagccgccccatct

SEQ ID NO: 1287 - RNA, 19 nt, synthetic construct
  source 1..19: mol_type = other RNA
tgcccagccgccccatctg

SEQ ID NO: 1288 - RNA, 19 nt, synthetic construct
  source 1..19: mol_type = other RNA
gcccagccgccccatctga

SEQ ID NO: 1289 - RNA, 19 nt, synthetic construct
  source 1..19: mol_type = other RNA
cccagccgccccatctgag

SEQ ID NO: 1290 - RNA, 19 nt, synthetic construct
  source 1..19: mol_type = other RNA
ccagccgccccatctgaga

SEQ ID NO: 1291 - RNA, 19 nt, synthetic construct
  source 1..19: mol_type = other RNA
cagccgccccatctgagaa

SEQ ID NO: 1292 - RNA, 19 nt, synthetic construct
  source 1..19: mol_type = other RNA
agccgccccatctgagaag

SEQ ID NO: 1293 - RNA, 19 nt, synthetic construct
  source 1..19: mol_type = other RNA
gccgccccatctgagaagg

SEQ ID NO: 1294 - RNA, 19 nt, synthetic construct
  source 1..19: mol_type = other RNA
ccgccccatctgagaaggg

SEQ ID NO: 1295 - RNA, 19 nt, synthetic construct
  source 1..19: mol_type = other RNA
cgccccatctgagaaggga

SEQ ID NO: 1296 - RNA, 19 nt, synthetic construct
  source 1..19: mol_type = other RNA
gccccatctgagaagggag

SEQ ID NO: 1297 - RNA, 19 nt, synthetic construct
  source 1..19: mol_type = other RNA
ccccatctgagaagggagg

SEQ ID NO: 1298 - RNA, 19 nt, synthetic construct
  source 1..19: mol_type = other RNA
cccatctgagaagggagga

SEQ ID NO: 1299 - RNA, 19 nt, synthetic construct
  source 1..19: mol_type = other RNA
ccatctgagaagggaggag

SEQ ID NO: 1300 - RNA, 19 nt, synthetic construct
  source 1..19: mol_type = other RNA
catctgagaagggaggaga

SEQ ID NO: 1301 - RNA, 19 nt, synthetic construct
  source 1..19: mol_type = other RNA
atctgagaagggaggagac

SEQ ID NO: 1302 - RNA, 19 nt, synthetic construct
  source 1..19: mol_type = other RNA
tctgagaagggaggagacc

SEQ ID NO: 1303 - RNA, 19 nt, synthetic construct
  source 1..19: mol_type = other RNA
ctgagaagggaggagaccc

SEQ ID NO: 1304 - RNA, 19 nt, synthetic construct
  source 1..19: mol_type = other RNA
tgagaagggaggagaccct

SEQ ID NO: 1305 - RNA, 19 nt, synthetic construct
  source 1..19: mol_type = other RNA
gagaagggaggagaccctc

SEQ ID NO: 1306 - RNA, 19 nt, synthetic construct
  source 1..19: mol_type = other RNA
agaagggaggagaccctcc

SEQ ID NO: 1307 - RNA, 19 nt, synthetic construct
  source 1..19: mol_type = other RNA
gaagggaggagaccctccg

SEQ ID NO: 1308 - RNA, 19 nt, synthetic construct
  source 1..19: mol_type = other RNA
aagggaggagaccctccgc

SEQ ID NO: 1309 - RNA, 19 nt, synthetic construct
  source 1..19: mol_type = other RNA
agggaggagaccctccgcc

SEQ ID NO: 1310 - RNA, 19 nt, synthetic construct
  source 1..19: mol_type = other RNA
gggaggagaccctccgcct

SEQ ID NO: 1311 - RNA, 19 nt, synthetic construct
  source 1..19: mol_type = other RNA
ggaggagaccctccgcctg

SEQ ID NO: 1312 - RNA, 19 nt, synthetic construct
  source 1..19: mol_type = other RNA
gaggagaccctccgcctgg

SEQ ID NO: 1313 - RNA, 19 nt, synthetic construct
  source 1..19: mol_type = other RNA
aggagaccctccgcctggc

SEQ ID NO: 1314 - RNA, 19 nt, synthetic construct
  source 1..19: mol_type = other RNA
ggagaccctccgcctggca

SEQ ID NO: 1315 - RNA, 19 nt, synthetic construct
  source 1..19: mol_type = other RNA
gagaccctccgcctggcaa

SEQ ID NO: 1316 - RNA, 19 nt, synthetic construct
  source 1..19: mol_type = other RNA
agaccctccgcctggcaac

SEQ ID NO: 1317 - RNA, 19 nt, synthetic construct
  source 1..19: mol_type = other RNA
gaccctccgcctggcaacc

SEQ ID NO: 1318 - RNA, 19 nt, synthetic construct
  source 1..19: mol_type = other RNA
accctccgcctggcaaccg

SEQ ID NO: 1319 - RNA, 19 nt, synthetic construct
  source 1..19: mol_type = other RNA
ccctccgcctggcaaccgc

SEQ ID NO: 1320 - RNA, 19 nt, synthetic construct
  source 1..19: mol_type = other RNA
cctccgcctggcaaccgcc

SEQ ID NO: 1321 - RNA, 19 nt, synthetic construct
  source 1..19: mol_type = other RNA
ctccgcctggcaaccgccc

SEQ ID NO: 1322 - RNA, 19 nt, synthetic construct
  source 1..19: mol_type = other RNA
tccgcctggcaaccgcccc

SEQ ID NO: 1323 - RNA, 19 nt, synthetic construct
  source 1..19: mol_type = other RNA
ccgcctggcaaccgccccg

SEQ ID NO: 1324 - RNA, 19 nt, synthetic construct
  source 1..19: mol_type = other RNA
cgcctggcaaccgccccgt

SEQ ID NO: 1325 - RNA, 19 nt, synthetic construct
  source 1..19: mol_type = other RNA
gcctggcaaccgccccgtc

SEQ ID NO: 1326 - RNA, 19 nt, synthetic construct
  source 1..19: mol_type = other RNA
cctggcaaccgccccgtct

SEQ ID NO: 1327 - RNA, 19 nt, synthetic construct
  source 1..19: mol_type = other RNA
ctggcaaccgccccgtctg

SEQ ID NO: 1328 - RNA, 19 nt, synthetic construct
  source 1..19: mol_type = other RNA
tggcaaccgccccgtctga

SEQ ID NO: 1329 - RNA, 19 nt, synthetic construct
  source 1..19: mol_type = other RNA
ggcaaccgccccgtctgag

SEQ ID NO: 1330 - RNA, 19 nt, synthetic construct
  source 1..19: mol_type = other RNA
gcaaccgccccgtctgaga

SEQ ID NO: 1331 - RNA, 19 nt, synthetic construct
  source 1..19: mol_type = other RNA
caaccgccccgtctgagaa

SEQ ID NO: 1332 - RNA, 19 nt, synthetic construct
  source 1..19: mol_type = other RNA
aaccgccccgtctgagaag

SEQ ID NO: 1333 - RNA, 19 nt, synthetic construct
  source 1..19: mol_type = other RNA
accgccccgtctgagaagt

SEQ ID NO: 1334 - RNA, 19 nt, synthetic construct
  source 1..19: mol_type = other RNA
ccgccccgtctgagaagtg

SEQ ID NO: 1335 - RNA, 19 nt, synthetic construct
  source 1..19: mol_type = other RNA
cgccccgtctgagaagtga

SEQ ID NO: 1336 - RNA, 19 nt, synthetic construct
  source 1..19: mol_type = other RNA
gccccgtctgagaagtgag

SEQ ID NO: 1337 - RNA, 19 nt, synthetic construct
  source 1..19: mol_type = other RNA
ccccgtctgagaagtgagg

SEQ ID NO: 1338 - RNA, 19 nt, synthetic construct
  source 1..19: mol_type = other RNA
cccgtctgagaagtgagga

SEQ ID NO: 1339 - RNA, 19 nt, synthetic construct
  source 1..19: mol_type = other RNA
ccgtctgagaagtgaggag

SEQ ID NO: 1340 - RNA, 19 nt, synthetic construct
  source 1..19: mol_type = other RNA
cgtctgagaagtgaggagc

SEQ ID NO: 1341 - RNA, 19 nt, synthetic construct
  source 1..19: mol_type = other RNA
gtctgagaagtgaggagcc

SEQ ID NO: 1342 - RNA, 19 nt, synthetic construct
  source 1..19: mol_type = other RNA
tctgagaagtgaggagccc

SEQ ID NO: 1343 - RNA, 19 nt, synthetic construct
  source 1..19: mol_type = other RNA
ctgagaagtgaggagcccc

SEQ ID NO: 1344 - RNA, 19 nt, synthetic construct
  source 1..19: mol_type = other RNA
tgagaagtgaggagcccct

SEQ ID NO: 1345 - RNA, 19 nt, synthetic construct
  source 1..19: mol_type = other RNA
gagaagtgaggagcccctc

SEQ ID NO: 1346 - RNA, 19 nt, synthetic construct
  source 1..19: mol_type = other RNA
agaagtgaggagcccctcc

SEQ ID NO: 1347 - RNA, 19 nt, synthetic construct
  source 1..19: mol_type = other RNA
gaagtgaggagcccctccg

SEQ ID NO: 1348 - RNA, 19 nt, synthetic construct
  source 1..19: mol_type = other RNA
aagtgaggagcccctccgc

SEQ ID NO: 1349 - RNA, 19 nt, synthetic construct
  source 1..19: mol_type = other RNA
agtgaggagcccctccgcc

SEQ ID NO: 1350 - RNA, 19 nt, synthetic construct
  source 1..19: mol_type = other RNA
gtgaggagcccctccgccc

SEQ ID NO: 1351 - RNA, 19 nt, synthetic construct
  source 1..19: mol_type = other RNA
tgaggagcccctccgcccg

SEQ ID NO: 1352 - RNA, 19 nt, synthetic construct
  source 1..19: mol_type = other RNA
gaggagcccctccgcccgg

SEQ ID NO: 1353 - RNA, 19 nt, synthetic construct
  source 1..19: mol_type = other RNA
aggagcccctccgcccggc

SEQ ID NO: 1354 - RNA, 19 nt, synthetic construct
  source 1..19: mol_type = other RNA
ggagcccctccgcccggca

SEQ ID NO: 1355 - RNA, 19 nt, synthetic construct
  source 1..19: mol_type = other RNA
gagcccctccgcccggcag

SEQ ID NO: 1356 - RNA, 19 nt, synthetic construct
  source 1..19: mol_type = other RNA
agcccctccgcccggcagc

SEQ ID NO: 1357 - RNA, 19 nt, synthetic construct
  source 1..19: mol_type = other RNA
gcccctccgcccggcagcc

SEQ ID NO: 1358 - RNA, 19 nt, synthetic construct
  source 1..19: mol_type = other RNA
cccctccgcccggcagcca

SEQ ID NO: 1359 - RNA, 19 nt, synthetic construct
  source 1..19: mol_type = other RNA
ccctccgcccggcagccac

SEQ ID NO: 1360 - RNA, 19 nt, synthetic construct
  source 1..19: mol_type = other RNA
cctccgcccggcagccacc

SEQ ID NO: 1361 - RNA, 19 nt, synthetic construct
  source 1..19: mol_type = other RNA
ctccgcccggcagccaccc

SEQ ID NO: 1362 - RNA, 19 nt, synthetic construct
  source 1..19: mol_type = other RNA
tccgcccggcagccacccc

SEQ ID NO: 1363 - RNA, 19 nt, synthetic construct
  source 1..19: mol_type = other RNA
ccgcccggcagccaccccg

SEQ ID NO: 1364 - RNA, 19 nt, synthetic construct
  source 1..19: mol_type = other RNA
cgcccggcagccaccccgt

SEQ ID NO: 1365 - RNA, 19 nt, synthetic construct
  source 1..19: mol_type = other RNA
gcccggcagccaccccgtc

SEQ ID NO: 1366 - RNA, 19 nt, synthetic construct
  source 1..19: mol_type = other RNA
cccggcagccaccccgtct

SEQ ID NO: 1367 - RNA, 19 nt, synthetic construct
  source 1..19: mol_type = other RNA
ccggcagccaccccgtctg

SEQ ID NO: 1368 - RNA, 19 nt, synthetic construct
  source 1..19: mol_type = other RNA
cggcagccaccccgtctgg

SEQ ID NO: 1369 - RNA, 19 nt, synthetic construct
  source 1..19: mol_type = other RNA
ggcagccaccccgtctggg

SEQ ID NO: 1370 - RNA, 19 nt, synthetic construct
  source 1..19: mol_type = other RNA
gcagccaccccgtctggga

SEQ ID NO: 1371 - RNA, 19 nt, synthetic construct
  source 1..19: mol_type = other RNA
cagccaccccgtctgggaa

SEQ ID NO: 1372 - RNA, 19 nt, synthetic construct
  source 1..19: mol_type = other RNA
agccaccccgtctgggaag

SEQ ID NO: 1373 - RNA, 19 nt, synthetic construct
  source 1..19: mol_type = other RNA
gccaccccgtctgggaagt

SEQ ID NO: 1374 - RNA, 19 nt, synthetic construct
  source 1..19: mol_type = other RNA
ccaccccgtctgggaagtg

SEQ ID NO: 1375 - RNA, 19 nt, synthetic construct
  source 1..19: mol_type = other RNA
caccccgtctgggaagtga

SEQ ID NO: 1376 - RNA, 19 nt, synthetic construct
  source 1..19: mol_type = other RNA
accccgtctgggaagtgag

SEQ ID NO: 1377 - RNA, 19 nt, synthetic construct
  source 1..19: mol_type = other RNA
ccccgtctgggaagtgagg

SEQ ID NO: 1378 - RNA, 19 nt, synthetic construct
  source 1..19: mol_type = other RNA
cccgtctgggaagtgagga

SEQ ID NO: 1379 - RNA, 19 nt, synthetic construct
  source 1..19: mol_type = other RNA
ccgtctgggaagtgaggag

SEQ ID NO: 1380 - RNA, 19 nt, synthetic construct
  source 1..19: mol_type = other RNA
cgtctgggaagtgaggagc

SEQ ID NO: 1381 - RNA, 19 nt, synthetic construct
  source 1..19: mol_type = other RNA
gtctgggaagtgaggagcg

SEQ ID NO: 1382 - RNA, 19 nt, synthetic construct
  source 1..19: mol_type = other RNA
tctgggaagtgaggagcgt

SEQ ID NO: 1383 - RNA, 19 nt, synthetic construct
  source 1..19: mol_type = other RNA
ctgggaagtgaggagcgtc

SEQ ID NO: 1384 - RNA, 19 nt, synthetic construct
  source 1..19: mol_type = other RNA
tgggaagtgaggagcgtct

SEQ ID NO: 1385 - RNA, 19 nt, synthetic construct
  source 1..19: mol_type = other RNA
gggaagtgaggagcgtctc

SEQ ID NO: 1386 - RNA, 19 nt, synthetic construct
  source 1..19: mol_type = other RNA
ggaagtgaggagcgtctcc

SEQ ID NO: 1387 - RNA, 19 nt, synthetic construct
  source 1..19: mol_type = other RNA
gaagtgaggagcgtctccg

SEQ ID NO: 1388 - RNA, 19 nt, synthetic construct
  source 1..19: mol_type = other RNA
aagtgaggagcgtctccgc

SEQ ID NO: 1389 - RNA, 19 nt, synthetic construct
  source 1..19: mol_type = other RNA
agtgaggagcgtctccgcc

SEQ ID NO: 1390 - RNA, 19 nt, synthetic construct
  source 1..19: mol_type = other RNA
gtgaggagcgtctccgcca

SEQ ID NO: 1391 - RNA, 19 nt, synthetic construct
  source 1..19: mol_type = other RNA
tgaggagcgtctccgccag

SEQ ID NO: 1392 - RNA, 19 nt, synthetic construct
  source 1..19: mol_type = other RNA
gaggagcgtctccgccagg

SEQ ID NO: 1393 - RNA, 19 nt, synthetic construct
  source 1..19: mol_type = other RNA
aggagcgtctccgccaggc

SEQ ID NO: 1394 - RNA, 19 nt, synthetic construct
  source 1..19: mol_type = other RNA
ggagcgtctccgccaggca

SEQ ID NO: 1395 - RNA, 19 nt, synthetic construct
  source 1..19: mol_type = other RNA
gagcgtctccgccaggcag

SEQ ID NO: 1396 - RNA, 19 nt, synthetic construct
  source 1..19: mol_type = other RNA
agcgtctccgccaggcagc

SEQ ID NO: 1397 - RNA, 19 nt, synthetic construct
  source 1..19: mol_type = other RNA
gcgtctccgccaggcagcc

SEQ ID NO: 1398 - RNA, 19 nt, synthetic construct
  source 1..19: mol_type = other RNA
cgtctccgccaggcagcca

SEQ ID NO: 1399 - RNA, 19 nt, synthetic construct
  source 1..19: mol_type = other RNA
gtctccgccaggcagccac

SEQ ID NO: 1400 - RNA, 19 nt, synthetic construct
  source 1..19: mol_type = other RNA
tctccgccaggcagccacc

SEQ ID NO: 1401 - RNA, 19 nt, synthetic construct
  source 1..19: mol_type = other RNA
ctccgccaggcagccaccc

SEQ ID NO: 1402 - RNA, 19 nt, synthetic construct
  source 1..19: mol_type = other RNA
tccgccaggcagccacccc

SEQ ID NO: 1403 - RNA, 19 nt, synthetic construct
  source 1..19: mol_type = other RNA
ccgccaggcagccaccccg

SEQ ID NO: 1404 - RNA, 19 nt, synthetic construct
  source 1..19: mol_type = other RNA
cgccaggcagccaccccgt

SEQ ID NO: 1405 - RNA, 19 nt, synthetic construct
  source 1..19: mol_type = other RNA
gccaggcagccaccccgtc

SEQ ID NO: 1406 - RNA, 19 nt, synthetic construct
  source 1..19: mol_type = other RNA
ccaggcagccaccccgtcc

SEQ ID NO: 1407 - RNA, 19 nt, synthetic construct
  source 1..19: mol_type = other RNA
caggcagccaccccgtccg

SEQ ID NO: 1408 - RNA, 19 nt, synthetic construct
  source 1..19: mol_type = other RNA
aggcagccaccccgtccgg

SEQ ID NO: 1409 - RNA, 19 nt, synthetic construct
  source 1..19: mol_type = other RNA
ggcagccaccccgtccggg

SEQ ID NO: 1410 - RNA, 19 nt, synthetic construct
  source 1..19: mol_type = other RNA
gcagccaccccgtccggga

SEQ ID NO: 1411 - RNA, 19 nt, synthetic construct
  source 1..19: mol_type = other RNA
cagccaccccgtccgggag

SEQ ID NO: 1412 - RNA, 19 nt, synthetic construct
  source 1..19: mol_type = other RNA
agccaccccgtccgggagg

SEQ ID NO: 1413 - RNA, 19 nt, synthetic construct
  source 1..19: mol_type = other RNA
gccaccccgtccgggaggg

SEQ ID NO: 1414 - RNA, 19 nt, synthetic construct
  source 1..19: mol_type = other RNA
ccaccccgtccgggaggga

SEQ ID NO: 1415 - RNA, 19 nt, synthetic construct
  source 1..19: mol_type = other RNA
caccccgtccgggagggag

SEQ ID NO: 1416 - RNA, 19 nt, synthetic construct
  source 1..19: mol_type = other RNA
accccgtccgggagggagg

SEQ ID NO: 1417 - RNA, 19 nt, synthetic construct
  source 1..19: mol_type = other RNA
ccccgtccgggagggaggt

SEQ ID NO: 1418 - RNA, 19 nt, synthetic construct
  source 1..19: mol_type = other RNA
cccgtccgggagggaggtg

SEQ ID NO: 1419 - RNA, 19 nt, synthetic construct
  source 1..19: mol_type = other RNA
ccgtccgggagggaggtgg

SEQ ID NO: 1420 - RNA, 19 nt, synthetic construct
  source 1..19: mol_type = other RNA
cgtccgggagggaggtggg

SEQ ID NO: 1421 - RNA, 19 nt, synthetic construct
  source 1..19: mol_type = other RNA
gtccgggagggaggtgggg

SEQ ID NO: 1422 - RNA, 19 nt, synthetic construct
  source 1..19: mol_type = other RNA
tccgggagggaggtggggg

SEQ ID NO: 1423 - RNA, 19 nt, synthetic construct
  source 1..19: mol_type = other RNA
ccgggagggaggtgggggt

SEQ ID NO: 1424 - RNA, 19 nt, synthetic construct
  source 1..19: mol_type = other RNA
cgggagggaggtgggggtc

SEQ ID NO: 1425 - RNA, 19 nt, synthetic construct
  source 1..19: mol_type = other RNA
gggagggaggtgggggtca

SEQ ID NO: 1426 - RNA, 19 nt, synthetic construct
  source 1..19: mol_type = other RNA
ggagggaggtgggggtcag

SEQ ID NO: 1427 - RNA, 19 nt, synthetic construct
  source 1..19: mol_type = other RNA
gagggaggtgggggtcagc

SEQ ID NO: 1428 - RNA, 19 nt, synthetic construct
  source 1..19: mol_type = other RNA
agggaggtgggggtcagcc

SEQ ID NO: 1429 - RNA, 19 nt, synthetic construct
  source 1..19: mol_type = other RNA
gggaggtgggggtcagccc

SEQ ID NO: 1430 - RNA, 19 nt, synthetic construct
  source 1..19: mol_type = other RNA
ggaggtgggggtcagcccc

SEQ ID NO: 1431 - RNA, 19 nt, synthetic construct
  source 1..19: mol_type = other RNA
gaggtgggggtcagccccc

SEQ ID NO: 1432 - RNA, 19 nt, synthetic construct
  source 1..19: mol_type = other RNA
aggtgggggtcagcccccg

SEQ ID NO: 1433 - RNA, 19 nt, synthetic construct
  source 1..19: mol_type = other RNA
ggtgggggtcagcccccgc

SEQ ID NO: 1434 - RNA, 19 nt, synthetic construct
  source 1..19: mol_type = other RNA
gtgggggtcagcccccgcc

SEQ ID NO: 1435 - RNA, 19 nt, synthetic construct
  source 1..19: mol_type = other RNA
tgggggtcagcccccgcca

SEQ ID NO: 1436 - RNA, 19 nt, synthetic construct
  source 1..19: mol_type = other RNA
gggggtcagcccccgccag

SEQ ID NO: 1437 - RNA, 19 nt, synthetic construct
  source 1..19: mol_type = other RNA
ggggtcagcccccgccagg

SEQ ID NO: 1438 - RNA, 19 nt, synthetic construct
  source 1..19: mol_type = other RNA
gggtcagcccccgccaggc

SEQ ID NO: 1439 - RNA, 19 nt, synthetic construct
  source 1..19: mol_type = other RNA
ggtcagcccccgccaggcc

SEQ ID NO: 1440 - RNA, 19 nt, synthetic construct
  source 1..19: mol_type = other RNA
gtcagcccccgccaggcca

SEQ ID NO: 1441 - RNA, 19 nt, synthetic construct
  source 1..19: mol_type = other RNA
tcagcccccgccaggccag

SEQ ID NO: 1442 - RNA, 19 nt, synthetic construct
  source 1..19: mol_type = other RNA
cagcccccgccaggccagc

SEQ ID NO: 1443 - RNA, 19 nt, synthetic construct
  source 1..19: mol_type = other RNA
agcccccgccaggccagct

SEQ ID NO: 1444 - RNA, 19 nt, synthetic construct
  source 1..19: mol_type = other RNA
gcccccgccaggccagctg

SEQ ID NO: 1445 - RNA, 19 nt, synthetic construct
  source 1..19: mol_type = other RNA
cccccgccaggccagctgc

SEQ ID NO: 1446 - RNA, 19 nt, synthetic construct
  source 1..19: mol_type = other RNA
ccccgccaggccagctgcc

SEQ ID NO: 1447 - RNA, 19 nt, synthetic construct
  source 1..19: mol_type = other RNA
cccgccaggccagctgccc

SEQ ID NO: 1448 - RNA, 19 nt, synthetic construct
  source 1..19: mol_type = other RNA
ccgccaggccagctgcccc

SEQ ID NO: 1449 - RNA, 19 nt, synthetic construct
  source 1..19: mol_type = other RNA
cgccaggccagctgcccca

SEQ ID NO: 1450 - RNA, 19 nt, synthetic construct
  source 1..19: mol_type = other RNA
gccaggccagctgccccat

SEQ ID NO: 1451 - RNA, 19 nt, synthetic construct
  source 1..19: mol_type = other RNA
ccaggccagctgccccatc

SEQ ID NO: 1452 - RNA, 19 nt, synthetic construct
  source 1..19: mol_type = other RNA
caggccagctgccccatcc

SEQ ID NO: 1453 - RNA, 19 nt, synthetic construct
  source 1..19: mol_type = other RNA
aggccagctgccccatccg

SEQ ID NO: 1454 - RNA, 19 nt, synthetic construct
  source 1..19: mol_type = other RNA
ggccagctgccccatccgg

SEQ ID NO: 1455 - RNA, 19 nt, synthetic construct
  source 1..19: mol_type = other RNA
gccagctgccccatccggg

SEQ ID NO: 1456 - RNA, 19 nt, synthetic construct
  source 1..19: mol_type = other RNA
ccagctgccccatccggga

SEQ ID NO: 1457 - RNA, 19 nt, synthetic construct
  source 1..19: mol_type = other RNA
cagctgccccatccgggag

SEQ ID NO: 1458 - RNA, 19 nt, synthetic construct
  source 1..19: mol_type = other RNA
agctgccccatccgggagg

SEQ ID NO: 1459 - RNA, 19 nt, synthetic construct
  source 1..19: mol_type = other RNA
gctgccccatccgggaggg

SEQ ID NO: 1460 - RNA, 19 nt, synthetic construct
  source 1..19: mol_type = other RNA
ctgccccatccgggaggga

SEQ ID NO: 1461 - RNA, 19 nt, synthetic construct
  source 1..19: mol_type = other RNA
tgccccatccgggagggag

SEQ ID NO: 1462 - RNA, 19 nt, synthetic construct
  source 1..19: mol_type = other RNA
gccccatccgggagggagg

SEQ ID NO: 1463 - RNA, 19 nt, synthetic construct
  source 1..19: mol_type = other RNA
ccccatccgggagggaggt

SEQ ID NO: 1464 - RNA, 19 nt, synthetic construct
  source 1..19: mol_type = other RNA
cccatccgggagggaggtg

SEQ ID NO: 1465 - RNA, 19 nt, synthetic construct
  source 1..19: mol_type = other RNA
ccatccgggagggaggtgg

SEQ ID NO: 1466 - RNA, 19 nt, synthetic construct
  source 1..19: mol_type = other RNA
catccgggagggaggtggg

SEQ ID NO: 1467 - RNA, 19 nt, synthetic construct
  source 1..19: mol_type = other RNA
atccgggagggaggtgggg

SEQ ID NO: 1468 - RNA, 19 nt, synthetic construct
  source 1..19: mol_type = other RNA
tccgggagggaggtggggg

SEQ ID NO: 1469 - RNA, 19 nt, synthetic construct
  source 1..19: mol_type = other RNA
ccgggagggaggtgggggg

SEQ ID NO: 1470 - RNA, 19 nt, synthetic construct
  source 1..19: mol_type = other RNA
cgggagggaggtggggggg

SEQ ID NO: 1471 - RNA, 19 nt, synthetic construct
  source 1..19: mol_type = other RNA
gggagggaggtgggggggg

SEQ ID NO: 1472 - RNA, 19 nt, synthetic construct
  source 1..19: mol_type = other RNA
ggagggaggtggggggggt

SEQ ID NO: 1473 - RNA, 19 nt, synthetic construct
  source 1..19: mol_type = other RNA
gagggaggtggggggggtc

SEQ ID NO: 1474 - RNA, 19 nt, synthetic construct
  source 1..19: mol_type = other RNA
agggaggtggggggggtca

SEQ ID NO: 1475 - RNA, 19 nt, synthetic construct
  source 1..19: mol_type = other RNA
gggaggtggggggggtcag

SEQ ID NO: 1476 - RNA, 19 nt, synthetic construct
  source 1..19: mol_type = other RNA
ggaggtggggggggtcagc

SEQ ID NO: 1477 - RNA, 19 nt, synthetic construct
  source 1..19: mol_type = other RNA
gaggtggggggggtcagcc

SEQ ID NO: 1478 - RNA, 19 nt, synthetic construct
  source 1..19: mol_type = other RNA
aggtggggggggtcagccc

SEQ ID NO: 1479 - RNA, 19 nt, synthetic construct
  source 1..19: mol_type = other RNA
ggtggggggggtcagcccc

SEQ ID NO: 1480 - RNA, 19 nt, synthetic construct
  source 1..19: mol_type = other RNA
gtggggggggtcagccccc

SEQ ID NO: 1481 - RNA, 19 nt, synthetic construct
  source 1..19: mol_type = other RNA
tggggggggtcagcccccc

SEQ ID NO: 1482 - RNA, 19 nt, synthetic construct
  source 1..19: mol_type = other RNA
ggggggggtcagccccccg

SEQ ID NO: 1483 - RNA, 19 nt, synthetic construct
  source 1..19: mol_type = other RNA
gggggggtcagccccccgc

SEQ ID NO: 1484 - RNA, 19 nt, synthetic construct
  source 1..19: mol_type = other RNA
ggggggtcagccccccgcc

SEQ ID NO: 1485 - RNA, 19 nt, synthetic construct
  source 1..19: mol_type = other RNA
gggggtcagccccccgccc

SEQ ID NO: 1486 - RNA, 19 nt, synthetic construct
  source 1..19: mol_type = other RNA
ggggtcagccccccgcccg

SEQ ID NO: 1487 - RNA, 19 nt, synthetic construct
  source 1..19: mol_type = other RNA
gggtcagccccccgcccgg

SEQ ID NO: 1488 - RNA, 19 nt, synthetic construct
  source 1..19: mol_type = other RNA
ggtcagccccccgcccggc

SEQ ID NO: 1489 - RNA, 19 nt, synthetic construct
  source 1..19: mol_type = other RNA
gtcagccccccgcccggcc

SEQ ID NO: 1490 - RNA, 19 nt, synthetic construct
  source 1..19: mol_type = other RNA
tcagccccccgcccggcca

SEQ ID NO: 1491 - RNA, 19 nt, synthetic construct
  source 1..19: mol_type = other RNA
cagccccccgcccggccag

SEQ ID NO: 1492 - RNA, 19 nt, synthetic construct
  source 1..19: mol_type = other RNA
agccccccgcccggccagc

SEQ ID NO: 1493 - RNA, 19 nt, synthetic construct
  source 1..19: mol_type = other RNA
gccccccgcccggccagcc

SEQ ID NO: 1494 - RNA, 19 nt, synthetic construct
  source 1..19: mol_type = other RNA
ccccccgcccggccagccg

SEQ ID NO: 1495 - RNA, 19 nt, synthetic construct
  source 1..19: mol_type = other RNA
cccccgcccggccagccgc

SEQ ID NO: 1496 - RNA, 19 nt, synthetic construct
  source 1..19: mol_type = other RNA
ccccgcccggccagccgcc

SEQ ID NO: 1497 - RNA, 19 nt, synthetic construct
  source 1..19: mol_type = other RNA
cccgcccggccagccgccc

SEQ ID NO: 1498 - RNA, 19 nt, synthetic construct
  source 1..19: mol_type = other RNA
ccgcccggccagccgcccc

SEQ ID NO: 1499 - RNA, 19 nt, synthetic construct
  source 1..19: mol_type = other RNA
cgcccggccagccgccccg

SEQ ID NO: 1500 - RNA, 19 nt, synthetic construct
  source 1..19: mol_type = other RNA
gcccggccagccgccccgt

SEQ ID NO: 1501 - RNA, 19 nt, synthetic construct
  source 1..19: mol_type = other RNA
cccggccagccgccccgtc

SEQ ID NO: 1502 - RNA, 19 nt, synthetic construct
  source 1..19: mol_type = other RNA
ccggccagccgccccgtcc

SEQ ID NO: 1503 - RNA, 19 nt, synthetic construct
  source 1..19: mol_type = other RNA
cggccagccgccccgtccg

SEQ ID NO: 1504 - RNA, 19 nt, synthetic construct
  source 1..19: mol_type = other RNA
ggccagccgccccgtccgg

SEQ ID NO: 1505 - RNA, 19 nt, synthetic construct
  source 1..19: mol_type = other RNA
gccagccgccccgtccggg

SEQ ID NO: 1506 - RNA, 19 nt, synthetic construct
  source 1..19: mol_type = other RNA
ccagccgccccgtccggga

SEQ ID NO: 1507 - RNA, 19 nt, synthetic construct
  source 1..19: mol_type = other RNA
cagccgccccgtccgggag

SEQ ID NO: 1508 - RNA, 19 nt, synthetic construct
  source 1..19: mol_type = other RNA
agccgccccgtccgggagg

SEQ ID NO: 1509 - RNA, 19 nt, synthetic construct
  source 1..19: mol_type = other RNA
gccgccccgtccgggaggt

SEQ ID NO: 1510 - RNA, 19 nt, synthetic construct
  source 1..19: mol_type = other RNA
ccgccccgtccgggaggtg

SEQ ID NO: 1511 - RNA, 19 nt, synthetic construct
  source 1..19: mol_type = other RNA
cgccccgtccgggaggtga

SEQ ID NO: 1512 - RNA, 19 nt, synthetic construct
  source 1..19: mol_type = other RNA
gccccgtccgggaggtgag

SEQ ID NO: 1513 - RNA, 19 nt, synthetic construct
  source 1..19: mol_type = other RNA
ccccgtccgggaggtgagg

SEQ ID NO: 1514 - RNA, 19 nt, synthetic construct
  source 1..19: mol_type = other RNA
cccgtccgggaggtgaggg

SEQ ID NO: 1515 - RNA, 19 nt, synthetic construct
  source 1..19: mol_type = other RNA
ccgtccgggaggtgagggg

SEQ ID NO: 1516 - RNA, 19 nt, synthetic construct
  source 1..19: mol_type = other RNA
cgtccgggaggtgaggggc

SEQ ID NO: 1517 - RNA, 19 nt, synthetic construct
  source 1..19: mol_type = other RNA
gtccgggaggtgaggggcg

SEQ ID NO: 1518 - RNA, 19 nt, synthetic construct
  source 1..19: mol_type = other RNA
tccgggaggtgaggggcgc

SEQ ID NO: 1519 - RNA, 19 nt, synthetic construct
  source 1..19: mol_type = other RNA
ccgggaggtgaggggcgcc

SEQ ID NO: 1520 - RNA, 19 nt, synthetic construct
  source 1..19: mol_type = other RNA
cgggaggtgaggggcgcct

SEQ ID NO: 1521 - RNA, 19 nt, synthetic construct
  source 1..19: mol_type = other RNA
gggaggtgaggggcgcctc

SEQ ID NO: 1522 - RNA, 19 nt, synthetic construct
  source 1..19: mol_type = other RNA
ggaggtgaggggcgcctct

SEQ ID NO: 1523 - RNA, 19 nt, synthetic construct
  source 1..19: mol_type = other RNA
gaggtgaggggcgcctctg

SEQ ID NO: 1524 - RNA, 19 nt, synthetic construct
  source 1..19: mol_type = other RNA
aggtgaggggcgcctctgc

SEQ ID NO: 1525 - RNA, 19 nt, synthetic construct
  source 1..19: mol_type = other RNA
ggtgaggggcgcctctgcc

SEQ ID NO: 1526 - RNA, 19 nt, synthetic construct
  source 1..19: mol_type = other RNA
gtgaggggcgcctctgccc

SEQ ID NO: 1527 - RNA, 19 nt, synthetic construct
  source 1..19: mol_type = other RNA
tgaggggcgcctctgccca

SEQ ID NO: 1528 - RNA, 19 nt, synthetic construct
  source 1..19: mol_type = other RNA
gaggggcgcctctgcccag

SEQ ID NO: 1529 - RNA, 19 nt, synthetic construct
  source 1..19: mol_type = other RNA
aggggcgcctctgcccagc

SEQ ID NO: 1530 - RNA, 19 nt, synthetic construct
  source 1..19: mol_type = other RNA
ggggcgcctctgcccagcc

SEQ ID NO: 1531 - RNA, 19 nt, synthetic construct
  source 1..19: mol_type = other RNA
gggcgcctctgcccagccg

SEQ ID NO: 1532 - RNA, 19 nt, synthetic construct
  source 1..19: mol_type = other RNA
ggcgcctctgcccagccgc

SEQ ID NO: 1533 - RNA, 19 nt, synthetic construct
  source 1..19: mol_type = other RNA
gcgcctctgcccagccgcc

SEQ ID NO: 1534 - RNA, 19 nt, synthetic construct
  source 1..19: mol_type = other RNA
cgcctctgcccagccgccc

SEQ ID NO: 1535 - RNA, 19 nt, synthetic construct
  source 1..19: mol_type = other RNA
gcctctgcccagccgcccc

SEQ ID NO: 1536 - RNA, 19 nt, synthetic construct
  source 1..19: mol_type = other RNA
cctctgcccagccgcccct

SEQ ID NO: 1537 - RNA, 19 nt, synthetic construct
  source 1..19: mol_type = other RNA
ctctgcccagccgccccta

SEQ ID NO: 1538 - RNA, 19 nt, synthetic construct
  source 1..19: mol_type = other RNA
tctgcccagccgcccctac

SEQ ID NO: 1539 - RNA, 19 nt, synthetic construct
  source 1..19: mol_type = other RNA
ctgcccagccgcccctact

SEQ ID NO: 1540 - RNA, 19 nt, synthetic construct
  source 1..19: mol_type = other RNA
tgcccagccgcccctactg

SEQ ID NO: 1541 - RNA, 19 nt, synthetic construct
  source 1..19: mol_type = other RNA
gcccagccgcccctactgg

SEQ ID NO: 1542 - RNA, 19 nt, synthetic construct
  source 1..19: mol_type = other RNA
cccagccgcccctactggg

SEQ ID NO: 1543 - RNA, 19 nt, synthetic construct
  source 1..19: mol_type = other RNA
ccagccgcccctactggga

SEQ ID NO: 1544 - RNA, 19 nt, synthetic construct
  source 1..19: mol_type = other RNA
cagccgcccctactgggaa

SEQ ID NO: 1545 - RNA, 19 nt, synthetic construct
  source 1..19: mol_type = other RNA
agccgcccctactgggaag

SEQ ID NO: 1546 - RNA, 19 nt, synthetic construct
  source 1..19: mol_type = other RNA
gccgcccctactgggaagt

SEQ ID NO: 1547 - RNA, 19 nt, synthetic construct
  source 1..19: mol_type = other RNA
ccgcccctactgggaagtg

SEQ ID NO: 1548 - RNA, 19 nt, synthetic construct
  source 1..19: mol_type = other RNA
cgcccctactgggaagtga

SEQ ID NO: 1549 - RNA, 19 nt, synthetic construct
  source 1..19: mol_type = other RNA
gcccctactgggaagtgag

SEQ ID NO: 1550 - RNA, 19 nt, synthetic construct
  source 1..19: mol_type = other RNA
cccctactgggaagtgagg

SEQ ID NO: 1551 - RNA, 19 nt, synthetic construct
  source 1..19: mol_type = other RNA
ccctactgggaagtgagga

SEQ ID NO: 1552 - RNA, 19 nt, synthetic construct
  source 1..19: mol_type = other RNA
cctactgggaagtgaggag

SEQ ID NO: 1553 - RNA, 19 nt, synthetic construct
  source 1..19: mol_type = other RNA
ctactgggaagtgaggagc

SEQ ID NO: 1554 - RNA, 19 nt, synthetic construct
  source 1..19: mol_type = other RNA
tactgggaagtgaggagcc

SEQ ID NO: 1555 - RNA, 19 nt, synthetic construct
  source 1..19: mol_type = other RNA
actgggaagtgaggagccc

SEQ ID NO: 1556 - RNA, 19 nt, synthetic construct
  source 1..19: mol_type = other RNA
ctgggaagtgaggagcccc

SEQ ID NO: 1557 - RNA, 19 nt, synthetic construct
  source 1..19: mol_type = other RNA
tgggaagtgaggagcccct

SEQ ID NO: 1558 - RNA, 19 nt, synthetic construct
  source 1..19: mol_type = other RNA
gggaagtgaggagcccctc

SEQ ID NO: 1559 - RNA, 19 nt, synthetic construct
  source 1..19: mol_type = other RNA
ggaagtgaggagcccctct

SEQ ID NO: 1560 - RNA, 19 nt, synthetic construct
  source 1..19: mol_type = other RNA
gaagtgaggagcccctcta

SEQ ID NO: 1561 - RNA, 19 nt, synthetic construct
  source 1..19: mol_type = other RNA
aagtgaggagcccctctac

SEQ ID NO: 1562 - RNA, 19 nt, synthetic construct
  source 1..19: mol_type = other RNA
agtgaggagcccctctacc

SEQ ID NO: 1563 - RNA, 19 nt, synthetic construct
  source 1..19: mol_type = other RNA
gtgaggagcccctctaccc

SEQ ID NO: 1564 - RNA, 19 nt, synthetic construct
  source 1..19: mol_type = other RNA
tgaggagcccctctacccg

SEQ ID NO: 1565 - RNA, 19 nt, synthetic construct
  source 1..19: mol_type = other RNA
gaggagcccctctacccgg

SEQ ID NO: 1566 - RNA, 19 nt, synthetic construct
  source 1..19: mol_type = other RNA
aggagcccctctacccggc

SEQ ID NO: 1567 - RNA, 19 nt, synthetic construct
  source 1..19: mol_type = other RNA
ggagcccctctacccggcc

SEQ ID NO: 1568 - RNA, 19 nt, synthetic construct
  source 1..19: mol_type = other RNA
gagcccctctacccggcca

SEQ ID NO: 1569 - RNA, 19 nt, synthetic construct
  source 1..19: mol_type = other RNA
agcccctctacccggccag

SEQ ID NO: 1570 - RNA, 19 nt, synthetic construct
  source 1..19: mol_type = other RNA
gcccctctacccggccagc

SEQ ID NO: 1571 - RNA, 19 nt, synthetic construct
  source 1..19: mol_type = other RNA
cccctctacccggccagcc

SEQ ID NO: 1572 - RNA, 19 nt, synthetic construct
  source 1..19: mol_type = other RNA
ccctctacccggccagccg

SEQ ID NO: 1573 - RNA, 19 nt, synthetic construct
  source 1..19: mol_type = other RNA
cctctacccggccagccgc

SEQ ID NO: 1574 - RNA, 19 nt, synthetic construct
  source 1..19: mol_type = other RNA
ctctacccggccagccgct

SEQ ID NO: 1575 - RNA, 19 nt, synthetic construct
  source 1..19: mol_type = other RNA
tctacccggccagccgctc

SEQ ID NO: 1576 - RNA, 19 nt, synthetic construct
  source 1..19: mol_type = other RNA
ctacccggccagccgctcc

SEQ ID NO: 1577 - RNA, 19 nt, synthetic construct
  source 1..19: mol_type = other RNA
tacccggccagccgctccg

SEQ ID NO: 1578 - RNA, 19 nt, synthetic construct
  source 1..19: mol_type = other RNA
acccggccagccgctccgt

SEQ ID NO: 1579 - RNA, 19 nt, synthetic construct
  source 1..19: mol_type = other RNA
cccggccagccgctccgtc

SEQ ID NO: 1580 - RNA, 19 nt, synthetic construct
  source 1..19: mol_type = other RNA
ccggccagccgctccgtcc

SEQ ID NO: 1581 - RNA, 19 nt, synthetic construct
  source 1..19: mol_type = other RNA
cggccagccgctccgtccg

SEQ ID NO: 1582 - RNA, 19 nt, synthetic construct
  source 1..19: mol_type = other RNA
ggccagccgctccgtccgg

SEQ ID NO: 1583 - RNA, 19 nt, synthetic construct
  source 1..19: mol_type = other RNA
gccagccgctccgtccggg

SEQ ID NO: 1584 - RNA, 19 nt, synthetic construct
  source 1..19: mol_type = other RNA
ccagccgctccgtccggga

SEQ ID NO: 1585 - RNA, 19 nt, synthetic construct
  source 1..19: mol_type = other RNA
cagccgctccgtccgggag

SEQ ID NO: 1586 - RNA, 19 nt, synthetic construct
  source 1..19: mol_type = other RNA
agccgctccgtccgggagg

SEQ ID NO: 1587 - RNA, 19 nt, synthetic construct
  source 1..19: mol_type = other RNA
gccgctccgtccgggaggg

SEQ ID NO: 1588 - RNA, 19 nt, synthetic construct
  source 1..19: mol_type = other RNA
ccgctccgtccgggaggga

SEQ ID NO: 1589 - RNA, 19 nt, synthetic construct
  source 1..19: mol_type = other RNA
cgctccgtccgggagggag

SEQ ID NO: 1590 - RNA, 19 nt, synthetic construct
  source 1..19: mol_type = other RNA
gctccgtccgggagggagg

SEQ ID NO: 1591 - RNA, 19 nt, synthetic construct
  source 1..19: mol_type = other RNA
ctccgtccgggagggaggt

SEQ ID NO: 1592 - RNA, 19 nt, synthetic construct
  source 1..19: mol_type = other RNA
tccgtccgggagggaggtg

SEQ ID NO: 1593 - RNA, 19 nt, synthetic construct
  source 1..19: mol_type = other RNA
ccgtccgggagggaggtgg

SEQ ID NO: 1594 - RNA, 19 nt, synthetic construct
  source 1..19: mol_type = other RNA
cgtccgggagggaggtggg

SEQ ID NO: 1595 - RNA, 19 nt, synthetic construct
  source 1..19: mol_type = other RNA
gtccgggagggaggtgggg

SEQ ID NO: 1596 - RNA, 19 nt, synthetic construct
  source 1..19: mol_type = other RNA
tccgggagggaggtggggg

SEQ ID NO: 1597 - RNA, 19 nt, synthetic construct
  source 1..19: mol_type = other RNA
ccgggagggaggtgggggg

SEQ ID NO: 1598 - RNA, 19 nt, synthetic construct
  source 1..19: mol_type = other RNA
cgggagggaggtggggggg

SEQ ID NO: 1599 - RNA, 19 nt, synthetic construct
  source 1..19: mol_type = other RNA
gggagggaggtgggggggt

SEQ ID NO: 1600 - RNA, 19 nt, synthetic construct
  source 1..19: mol_type = other RNA
ggagggaggtgggggggtc

SEQ ID NO: 1601 - RNA, 19 nt, synthetic construct
  source 1..19: mol_type = other RNA
gagggaggtgggggggtca

SEQ ID NO: 1602 - RNA, 19 nt, synthetic construct
  source 1..19: mol_type = other RNA
agggaggtgggggggtcag

SEQ ID NO: 1603 - RNA, 19 nt, synthetic construct
  source 1..19: mol_type = other RNA
gggaggtgggggggtcaga

SEQ ID NO: 1604 - RNA, 19 nt, synthetic construct
  source 1..19: mol_type = other RNA
ggaggtgggggggtcagac

SEQ ID NO: 1605 - RNA, 19 nt, synthetic construct
  source 1..19: mol_type = other RNA
gaggtgggggggtcagacc

SEQ ID NO: 1606 - RNA, 19 nt, synthetic construct
  source 1..19: mol_type = other RNA
aggtgggggggtcagaccc

SEQ ID NO: 1607 - RNA, 19 nt, synthetic construct
  source 1..19: mol_type = other RNA
ggtgggggggtcagacccc

SEQ ID NO: 1608 - RNA, 19 nt, synthetic construct
  source 1..19: mol_type = other RNA
gtgggggggtcagaccccg

SEQ ID NO: 1609 - RNA, 19 nt, synthetic construct
  source 1..19: mol_type = other RNA
tgggggggtcagaccccgc

SEQ ID NO: 1610 - RNA, 19 nt, synthetic construct
  source 1..19: mol_type = other RNA
gggggggtcagaccccgcc

SEQ ID NO: 1611 - RNA, 19 nt, synthetic construct
  source 1..19: mol_type = other RNA
ggggggtcagaccccgccc

SEQ ID NO: 1612 - RNA, 19 nt, synthetic construct
  source 1..19: mol_type = other RNA
gggggtcagaccccgcccg

SEQ ID NO: 1613 - RNA, 19 nt, synthetic construct
  source 1..19: mol_type = other RNA
ggggtcagaccccgcccgg

SEQ ID NO: 1614 - RNA, 19 nt, synthetic construct
  source 1..19: mol_type = other RNA
gggtcagaccccgcccggc

SEQ ID NO: 1615 - RNA, 19 nt, synthetic construct
  source 1..19: mol_type = other RNA
ggtcagaccccgcccggcc

SEQ ID NO: 1616 - RNA, 19 nt, synthetic construct
  source 1..19: mol_type = other RNA
gtcagaccccgcccggcca

SEQ ID NO: 1617 - RNA, 19 nt, synthetic construct
  source 1..19: mol_type = other RNA
tcagaccccgcccggccag

SEQ ID NO: 1618 - RNA, 19 nt, synthetic construct
  source 1..19: mol_type = other RNA
cagaccccgcccggccagc

SEQ ID NO: 1619 - RNA, 19 nt, synthetic construct
  source 1..19: mol_type = other RNA
agaccccgcccggccagcc

SEQ ID NO: 1620 - RNA, 19 nt, synthetic construct
  source 1..19: mol_type = other RNA
gaccccgcccggccagccg

SEQ ID NO: 1621 - RNA, 19 nt, synthetic construct
  source 1..19: mol_type = other RNA
accccgcccggccagccgc

SEQ ID NO: 1622 - RNA, 19 nt, synthetic construct
  source 1..19: mol_type = other RNA
ccccgcccggccagccgcc

SEQ ID NO: 1623 - RNA, 19 nt, synthetic construct
  source 1..19: mol_type = other RNA
cccgcccggccagccgccc

SEQ ID NO: 1624 - RNA, 19 nt, synthetic construct
  source 1..19: mol_type = other RNA
ccgcccggccagccgcccc

SEQ ID NO: 1625 - RNA, 19 nt, synthetic construct
  source 1..19: mol_type = other RNA
cgcccggccagccgccccg

SEQ ID NO: 1626 - RNA, 19 nt, synthetic construct
  source 1..19: mol_type = other RNA
gcccggccagccgccccgt

SEQ ID NO: 1627 - RNA, 19 nt, synthetic construct
  source 1..19: mol_type = other RNA
cccggccagccgccccgtc

SEQ ID NO: 1628 - RNA, 19 nt, synthetic construct
  source 1..19: mol_type = other RNA
ccggccagccgccccgtcc

SEQ ID NO: 1629 - RNA, 19 nt, synthetic construct
  source 1..19: mol_type = other RNA
cggccagccgccccgtccg

SEQ ID NO: 1630 - RNA, 19 nt, synthetic construct
  source 1..19: mol_type = other RNA
ggccagccgccccgtccgg

SEQ ID NO: 1631 - RNA, 19 nt, synthetic construct
  source 1..19: mol_type = other RNA
gccagccgccccgtccggg

SEQ ID NO: 1632 - RNA, 19 nt, synthetic construct
  source 1..19: mol_type = other RNA
ccagccgccccgtccggga

SEQ ID NO: 1633 - RNA, 19 nt, synthetic construct
  source 1..19: mol_type = other RNA
cagccgccccgtccgggag

SEQ ID NO: 1634 - RNA, 19 nt, synthetic construct
  source 1..19: mol_type = other RNA
agccgccccgtccgggagg

SEQ ID NO: 1635 - RNA, 19 nt, synthetic construct
  source 1..19: mol_type = other RNA
gccgccccgtccgggaggg

SEQ ID NO: 1636 - RNA, 19 nt, synthetic construct
  source 1..19: mol_type = other RNA
ccgccccgtccgggaggga

SEQ ID NO: 1637 - RNA, 19 nt, synthetic construct
  source 1..19: mol_type = other RNA
cgccccgtccgggagggag

SEQ ID NO: 1638 - RNA, 19 nt, synthetic construct
  source 1..19: mol_type = other RNA
gccccgtccgggagggagg

SEQ ID NO: 1639 - RNA, 19 nt, synthetic construct
  source 1..19: mol_type = other RNA
ccccgtccgggagggaggt

SEQ ID NO: 1640 - RNA, 19 nt, synthetic construct
  source 1..19: mol_type = other RNA
cccgtccgggagggaggtg

SEQ ID NO: 1641 - RNA, 19 nt, synthetic construct
  source 1..19: mol_type = other RNA
ccgtccgggagggaggtgg

SEQ ID NO: 1642 - RNA, 19 nt, synthetic construct
  source 1..19: mol_type = other RNA
cgtccgggagggaggtggg

SEQ ID NO: 1643 - RNA, 19 nt, synthetic construct
  source 1..19: mol_type = other RNA
gtccgggagggaggtgggg

SEQ ID NO: 1644 - RNA, 19 nt, synthetic construct
  source 1..19: mol_type = other RNA
tccgggagggaggtggggg

SEQ ID NO: 1645 - RNA, 19 nt, synthetic construct
  source 1..19: mol_type = other RNA
ccgggagggaggtgggggg

SEQ ID NO: 1646 - RNA, 19 nt, synthetic construct
  source 1..19: mol_type = other RNA
cgggagggaggtggggggt

SEQ ID NO: 1647 - RNA, 19 nt, synthetic construct
  source 1..19: mol_type = other RNA
gggagggaggtggggggtt

SEQ ID NO: 1648 - RNA, 19 nt, synthetic construct
  source 1..19: mol_type = other RNA
ggagggaggtggggggttc

SEQ ID NO: 1649 - RNA, 19 nt, synthetic construct
  source 1..19: mol_type = other RNA
gagggaggtggggggttca

SEQ ID NO: 1650 - RNA, 19 nt, synthetic construct
  source 1..19: mol_type = other RNA
agggaggtggggggttcag

SEQ ID NO: 1651 - RNA, 19 nt, synthetic construct
  source 1..19: mol_type = other RNA
gggaggtggggggttcagc

SEQ ID NO: 1652 - RNA, 19 nt, synthetic construct
  source 1..19: mol_type = other RNA
ggaggtggggggttcagcc

SEQ ID NO: 1653 - RNA, 19 nt, synthetic construct
  source 1..19: mol_type = other RNA
gaggtggggggttcagccc

SEQ ID NO: 1654 - RNA, 19 nt, synthetic construct
  source 1..19: mol_type = other RNA
aggtggggggttcagcccc

SEQ ID NO: 1655 - RNA, 19 nt, synthetic construct
  source 1..19: mol_type = other RNA
ggtggggggttcagccccc

SEQ ID NO: 1656 - RNA, 19 nt, synthetic construct
  source 1..19: mol_type = other RNA
gtggggggttcagcccccc

SEQ ID NO: 1657 - RNA, 19 nt, synthetic construct
  source 1..19: mol_type = other RNA
tggggggttcagcccccca

SEQ ID NO: 1658 - RNA, 19 nt, synthetic construct
  source 1..19: mol_type = other RNA
ggggggttcagccccccac

SEQ ID NO: 1659 - RNA, 19 nt, synthetic construct
  source 1..19: mol_type = other RNA
gggggttcagccccccacc

SEQ ID NO: 1660 - RNA, 19 nt, synthetic construct
  source 1..19: mol_type = other RNA
ggggttcagccccccaccc

SEQ ID NO: 1661 - RNA, 19 nt, synthetic construct
  source 1..19: mol_type = other RNA
gggttcagccccccacccg

SEQ ID NO: 1662 - RNA, 19 nt, synthetic construct
  source 1..19: mol_type = other RNA
ggttcagccccccacccgg

SEQ ID NO: 1663 - RNA, 19 nt, synthetic construct
  source 1..19: mol_type = other RNA
gttcagccccccacccggc

SEQ ID NO: 1664 - RNA, 19 nt, synthetic construct
  source 1..19: mol_type = other RNA
ttcagccccccacccggcc

SEQ ID NO: 1665 - RNA, 19 nt, synthetic construct
  source 1..19: mol_type = other RNA
tcagccccccacccggcca

SEQ ID NO: 1666 - RNA, 19 nt, synthetic construct
  source 1..19: mol_type = other RNA
cagccccccacccggccag

SEQ ID NO: 1667 - RNA, 19 nt, synthetic construct
  source 1..19: mol_type = other RNA
agccccccacccggccagc

SEQ ID NO: 1668 - RNA, 19 nt, synthetic construct
  source 1..19: mol_type = other RNA
gccccccacccggccagcc

SEQ ID NO: 1669 - RNA, 19 nt, synthetic construct
  source 1..19: mol_type = other RNA
ccccccacccggccagcca

SEQ ID NO: 1670 - RNA, 19 nt, synthetic construct
  source 1..19: mol_type = other RNA
cccccacccggccagccac

SEQ ID NO: 1671 - RNA, 19 nt, synthetic construct
  source 1..19: mol_type = other RNA
ccccacccggccagccacc

SEQ ID NO: 1672 - RNA, 19 nt, synthetic construct
  source 1..19: mol_type = other RNA
cccacccggccagccacca

SEQ ID NO: 1673 - RNA, 19 nt, synthetic construct
  source 1..19: mol_type = other RNA
ccacccggccagccaccac

SEQ ID NO: 1674 - RNA, 19 nt, synthetic construct
  source 1..19: mol_type = other RNA
cacccggccagccaccacg

SEQ ID NO: 1675 - RNA, 19 nt, synthetic construct
  source 1..19: mol_type = other RNA
acccggccagccaccacgt

SEQ ID NO: 1676 - RNA, 19 nt, synthetic construct
  source 1..19: mol_type = other RNA
cccggccagccaccacgtc

SEQ ID NO: 1677 - RNA, 19 nt, synthetic construct
  source 1..19: mol_type = other RNA
ccggccagccaccacgtct

SEQ ID NO: 1678 - RNA, 19 nt, synthetic construct
  source 1..19: mol_type = other RNA
cggccagccaccacgtctg

SEQ ID NO: 1679 - RNA, 19 nt, synthetic construct
  source 1..19: mol_type = other RNA
ggccagccaccacgtctgg

SEQ ID NO: 1680 - RNA, 19 nt, synthetic construct
  source 1..19: mol_type = other RNA
gccagccaccacgtctggg

SEQ ID NO: 1681 - RNA, 19 nt, synthetic construct
  source 1..19: mol_type = other RNA
ccagccaccacgtctggga

SEQ ID NO: 1682 - RNA, 19 nt, synthetic construct
  source 1..19: mol_type = other RNA
cagccaccacgtctgggag

SEQ ID NO: 1683 - RNA, 19 nt, synthetic construct
  source 1..19: mol_type = other RNA
agccaccacgtctgggagg

SEQ ID NO: 1684 - RNA, 19 nt, synthetic construct
  source 1..19: mol_type = other RNA
gccaccacgtctgggaggg

SEQ ID NO: 1685 - RNA, 19 nt, synthetic construct
  source 1..19: mol_type = other RNA
ccaccacgtctgggaggga

SEQ ID NO: 1686 - RNA, 19 nt, synthetic construct
  source 1..19: mol_type = other RNA
caccacgtctgggagggag

SEQ ID NO: 1687 - RNA, 19 nt, synthetic construct
  source 1..19: mol_type = other RNA
accacgtctgggagggagg

SEQ ID NO: 1688 - RNA, 19 nt, synthetic construct
  source 1..19: mol_type = other RNA
ccacgtctgggagggaggt

SEQ ID NO: 1689 - RNA, 19 nt, synthetic construct
  source 1..19: mol_type = other RNA
cacgtctgggagggaggtg

SEQ ID NO: 1690 - RNA, 19 nt, synthetic construct
  source 1..19: mol_type = other RNA
acgtctgggagggaggtgg

SEQ ID NO: 1691 - RNA, 19 nt, synthetic construct
  source 1..19: mol_type = other RNA
cgtctgggagggaggtggg

SEQ ID NO: 1692 - RNA, 19 nt, synthetic construct
  source 1..19: mol_type = other RNA
gtctgggagggaggtgggg

SEQ ID NO: 1693 - RNA, 19 nt, synthetic construct
  source 1..19: mol_type = other RNA
tctgggagggaggtggggg

SEQ ID NO: 1694 - RNA, 19 nt, synthetic construct
  source 1..19: mol_type = other RNA
ctgggagggaggtgggggg

SEQ ID NO: 1695 - RNA, 19 nt, synthetic construct
  source 1..19: mol_type = other RNA
tgggagggaggtggggggg

SEQ ID NO: 1696 - RNA, 19 nt, synthetic construct
  source 1..19: mol_type = other RNA
gggagggaggtgggggggt

SEQ ID NO: 1697 - RNA, 19 nt, synthetic construct
  source 1..19: mol_type = other RNA
ggagggaggtgggggggtc

SEQ ID NO: 1698 - RNA, 19 nt, synthetic construct
  source 1..19: mol_type = other RNA
gagggaggtgggggggtca

SEQ ID NO: 1699 - RNA, 19 nt, synthetic construct
  source 1..19: mol_type = other RNA
agggaggtgggggggtcag

SEQ ID NO: 1700 - RNA, 19 nt, synthetic construct
  source 1..19: mol_type = other RNA
gggaggtgggggggtcagc

SEQ ID NO: 1701 - RNA, 19 nt, synthetic construct
  source 1..19: mol_type = other RNA
ggaggtgggggggtcagcc

SEQ ID NO: 1702 - RNA, 19 nt, synthetic construct
  source 1..19: mol_type = other RNA
gaggtgggggggtcagccc

SEQ ID NO: 1703 - RNA, 19 nt, synthetic construct
  source 1..19: mol_type = other RNA
aggtgggggggtcagccct

SEQ ID NO: 1704 - RNA, 19 nt, synthetic construct
  source 1..19: mol_type = other RNA
ggtgggggggtcagccctc

SEQ ID NO: 1705 - RNA, 19 nt, synthetic construct
  source 1..19: mol_type = other RNA
gtgggggggtcagccctct

SEQ ID NO: 1706 - RNA, 19 nt, synthetic construct
  source 1..19: mol_type = other RNA
tgggggggtcagccctctg

SEQ ID NO: 1707 - RNA, 19 nt, synthetic construct
  source 1..19: mol_type = other RNA
gggggggtcagccctctgc

SEQ ID NO: 1708 - RNA, 19 nt, synthetic construct
  source 1..19: mol_type = other RNA
ggggggtcagccctctgcc

SEQ ID NO: 1709 - RNA, 19 nt, synthetic construct
  source 1..19: mol_type = other RNA
gggggtcagccctctgccc

SEQ ID NO: 1710 - RNA, 19 nt, synthetic construct
  source 1..19: mol_type = other RNA
ggggtcagccctctgcccg

SEQ ID NO: 1711 - RNA, 19 nt, synthetic construct
  source 1..19: mol_type = other RNA
gggtcagccctctgcccgg

SEQ ID NO: 1712 - RNA, 19 nt, synthetic construct
  source 1..19: mol_type = other RNA
ggtcagccctctgcccggc

SEQ ID NO: 1713 - RNA, 19 nt, synthetic construct
  source 1..19: mol_type = other RNA
gtcagccctctgcccggcc

SEQ ID NO: 1714 - RNA, 19 nt, synthetic construct
  source 1..19: mol_type = other RNA
tcagccctctgcccggcca

SEQ ID NO: 1715 - RNA, 19 nt, synthetic construct
  source 1..19: mol_type = other RNA
cagccctctgcccggccag

SEQ ID NO: 1716 - RNA, 19 nt, synthetic construct
  source 1..19: mol_type = other RNA
agccctctgcccggccagc

SEQ ID NO: 1717 - RNA, 19 nt, synthetic construct
  source 1..19: mol_type = other RNA
gccctctgcccggccagcc

SEQ ID NO: 1718 - RNA, 19 nt, synthetic construct
  source 1..19: mol_type = other RNA
ccctctgcccggccagccg

SEQ ID NO: 1719 - RNA, 19 nt, synthetic construct
  source 1..19: mol_type = other RNA
cctctgcccggccagccgc

SEQ ID NO: 1720 - RNA, 19 nt, synthetic construct
  source 1..19: mol_type = other RNA
ctctgcccggccagccgcc

SEQ ID NO: 1721 - RNA, 19 nt, synthetic construct
  source 1..19: mol_type = other RNA
tctgcccggccagccgccc

SEQ ID NO: 1722 - RNA, 19 nt, synthetic construct
  source 1..19: mol_type = other RNA
ctgcccggccagccgcccc

SEQ ID NO: 1723 - RNA, 19 nt, synthetic construct
  source 1..19: mol_type = other RNA
tgcccggccagccgccccg

SEQ ID NO: 1724 - RNA, 19 nt, synthetic construct
  source 1..19: mol_type = other RNA
gcccggccagccgccccgt

SEQ ID NO: 1725 - RNA, 19 nt, synthetic construct
  source 1..19: mol_type = other RNA
cccggccagccgccccgtc

SEQ ID NO: 1726 - RNA, 19 nt, synthetic construct
  source 1..19: mol_type = other RNA
ccggccagccgccccgtcc

SEQ ID NO: 1727 - RNA, 19 nt, synthetic construct
  source 1..19: mol_type = other RNA
cggccagccgccccgtccg

SEQ ID NO: 1728 - RNA, 19 nt, synthetic construct
  source 1..19: mol_type = other RNA
ggccagccgccccgtccgg

SEQ ID NO: 1729 - RNA, 19 nt, synthetic construct
  source 1..19: mol_type = other RNA
gccagccgccccgtccggg

SEQ ID NO: 1730 - RNA, 19 nt, synthetic construct
  source 1..19: mol_type = other RNA
ccagccgccccgtccggga

SEQ ID NO: 1731 - RNA, 19 nt, synthetic construct
  source 1..19: mol_type = other RNA
cagccgccccgtccgggag

SEQ ID NO: 1732 - RNA, 19 nt, synthetic construct
  source 1..19: mol_type = other RNA
agccgccccgtccgggagg

SEQ ID NO: 1733 - RNA, 19 nt, synthetic construct
  source 1..19: mol_type = other RNA
gccgccccgtccgggaggg

SEQ ID NO: 1734 - RNA, 19 nt, synthetic construct
  source 1..19: mol_type = other RNA
ccgccccgtccgggaggga

SEQ ID NO: 1735 - RNA, 19 nt, synthetic construct
  source 1..19: mol_type = other RNA
cgccccgtccgggagggag

SEQ ID NO: 1736 - RNA, 19 nt, synthetic construct
  source 1..19: mol_type = other RNA
gccccgtccgggagggagg

SEQ ID NO: 1737 - RNA, 19 nt, synthetic construct
  source 1..19: mol_type = other RNA
ccccgtccgggagggaggt

SEQ ID NO: 1738 - RNA, 19 nt, synthetic construct
  source 1..19: mol_type = other RNA
cccgtccgggagggaggtg

SEQ ID NO: 1739 - RNA, 19 nt, synthetic construct
  source 1..19: mol_type = other RNA
ccgtccgggagggaggtgg

SEQ ID NO: 1740 - RNA, 19 nt, synthetic construct
  source 1..19: mol_type = other RNA
cgtccgggagggaggtggg

SEQ ID NO: 1741 - RNA, 19 nt, synthetic construct
  source 1..19: mol_type = other RNA
gtccgggagggaggtgggg

SEQ ID NO: 1742 - RNA, 19 nt, synthetic construct
  source 1..19: mol_type = other RNA
tccgggagggaggtggggg

SEQ ID NO: 1743 - RNA, 19 nt, synthetic construct
  source 1..19: mol_type = other RNA
ccgggagggaggtgggggg

SEQ ID NO: 1744 - RNA, 19 nt, synthetic construct
  source 1..19: mol_type = other RNA
cgggagggaggtggggggt

SEQ ID NO: 1745 - RNA, 19 nt, synthetic construct
  source 1..19: mol_type = other RNA
gggagggaggtggggggtt

SEQ ID NO: 1746 - RNA, 19 nt, synthetic construct
  source 1..19: mol_type = other RNA
ggagggaggtggggggttc

SEQ ID NO: 1747 - RNA, 19 nt, synthetic construct
  source 1..19: mol_type = other RNA
gagggaggtggggggttca

SEQ ID NO: 1748 - RNA, 19 nt, synthetic construct
  source 1..19: mol_type = other RNA
agggaggtggggggttcag

SEQ ID NO: 1749 - RNA, 19 nt, synthetic construct
  source 1..19: mol_type = other RNA
gggaggtggggggttcagc

SEQ ID NO: 1750 - RNA, 19 nt, synthetic construct
  source 1..19: mol_type = other RNA
ggaggtggggggttcagcc

SEQ ID NO: 1751 - RNA, 19 nt, synthetic construct
  source 1..19: mol_type = other RNA
gaggtggggggttcagccc

SEQ ID NO: 1752 - RNA, 19 nt, synthetic construct
  source 1..19: mol_type = other RNA
aggtggggggttcagcccc

SEQ ID NO: 1753 - RNA, 19 nt, synthetic construct
  source 1..19: mol_type = other RNA
ggtggggggttcagccccc

SEQ ID NO: 1754 - RNA, 19 nt, synthetic construct
  source 1..19: mol_type = other RNA
gtggggggttcagcccccc

SEQ ID NO: 1755 - RNA, 19 nt, synthetic construct
  source 1..19: mol_type = other RNA
tggggggttcagcccccca

SEQ ID NO: 1756 - RNA, 19 nt, synthetic construct
  source 1..19: mol_type = other RNA
ggggggttcagccccccac

SEQ ID NO: 1757 - RNA, 19 nt, synthetic construct
  source 1..19: mol_type = other RNA
gggggttcagccccccacc

SEQ ID NO: 1758 - RNA, 19 nt, synthetic construct
  source 1..19: mol_type = other RNA
ggggttcagccccccaccc

SEQ ID NO: 1759 - RNA, 19 nt, synthetic construct
  source 1..19: mol_type = other RNA
gggttcagccccccacccg

SEQ ID NO: 1760 - RNA, 19 nt, synthetic construct
  source 1..19: mol_type = other RNA
ggttcagccccccacccgg

SEQ ID NO: 1761 - RNA, 19 nt, synthetic construct
  source 1..19: mol_type = other RNA
gttcagccccccacccggc

SEQ ID NO: 1762 - RNA, 19 nt, synthetic construct
  source 1..19: mol_type = other RNA
ttcagccccccacccggcc

SEQ ID NO: 1763 - RNA, 19 nt, synthetic construct
  source 1..19: mol_type = other RNA
tcagccccccacccggcca

SEQ ID NO: 1764 - RNA, 19 nt, synthetic construct
  source 1..19: mol_type = other RNA
cagccccccacccggccag

SEQ ID NO: 1765 - RNA, 19 nt, synthetic construct
  source 1..19: mol_type = other RNA
agccccccacccggccagc

SEQ ID NO: 1766 - RNA, 19 nt, synthetic construct
  source 1..19: mol_type = other RNA
gccccccacccggccagcc

SEQ ID NO: 1767 - RNA, 19 nt, synthetic construct
  source 1..19: mol_type = other RNA
ccccccacccggccagccg

SEQ ID NO: 1768 - RNA, 19 nt, synthetic construct
  source 1..19: mol_type = other RNA
cccccacccggccagccgc

SEQ ID NO: 1769 - RNA, 19 nt, synthetic construct
  source 1..19: mol_type = other RNA
ccccacccggccagccgcc

SEQ ID NO: 1770 - RNA, 19 nt, synthetic construct
  source 1..19: mol_type = other RNA
cccacccggccagccgccc

SEQ ID NO: 1771 - RNA, 19 nt, synthetic construct
  source 1..19: mol_type = other RNA
ccacccggccagccgcccc

SEQ ID NO: 1772 - RNA, 19 nt, synthetic construct
  source 1..19: mol_type = other RNA
cacccggccagccgccccg

SEQ ID NO: 1773 - RNA, 19 nt, synthetic construct
  source 1..19: mol_type = other RNA
acccggccagccgccccgt

SEQ ID NO: 1774 - RNA, 19 nt, synthetic construct
  source 1..19: mol_type = other RNA
cccggccagccgccccgtc

SEQ ID NO: 1775 - RNA, 19 nt, synthetic construct
  source 1..19: mol_type = other RNA
ccggccagccgccccgtcc

SEQ ID NO: 1776 - RNA, 19 nt, synthetic construct
  source 1..19: mol_type = other RNA
cggccagccgccccgtccg

SEQ ID NO: 1777 - RNA, 19 nt, synthetic construct
  source 1..19: mol_type = other RNA
ggccagccgccccgtccgg

SEQ ID NO: 1778 - RNA, 19 nt, synthetic construct
  source 1..19: mol_type = other RNA
gccagccgccccgtccggg

SEQ ID NO: 1779 - RNA, 19 nt, synthetic construct
  source 1..19: mol_type = other RNA
ccagccgccccgtccggga

SEQ ID NO: 1780 - RNA, 19 nt, synthetic construct
  source 1..19: mol_type = other RNA
cagccgccccgtccgggag

SEQ ID NO: 1781 - RNA, 19 nt, synthetic construct
  source 1..19: mol_type = other RNA
agccgccccgtccgggagg

SEQ ID NO: 1782 - RNA, 19 nt, synthetic construct
  source 1..19: mol_type = other RNA
gccgccccgtccgggaggg

SEQ ID NO: 1783 - RNA, 19 nt, synthetic construct
  source 1..19: mol_type = other RNA
ccgccccgtccgggaggga

SEQ ID NO: 1784 - RNA, 19 nt, synthetic construct
  source 1..19: mol_type = other RNA
cgccccgtccgggagggag

SEQ ID NO: 1785 - RNA, 19 nt, synthetic construct
  source 1..19: mol_type = other RNA
gccccgtccgggagggagg

SEQ ID NO: 1786 - RNA, 19 nt, synthetic construct
  source 1..19: mol_type = other RNA
ccccgtccgggagggaggt

SEQ ID NO: 1787 - RNA, 19 nt, synthetic construct
  source 1..19: mol_type = other RNA
cccgtccgggagggaggtg

SEQ ID NO: 1788 - RNA, 19 nt, synthetic construct
  source 1..19: mol_type = other RNA
ccgtccgggagggaggtgg

SEQ ID NO: 1789 - RNA, 19 nt, synthetic construct
  source 1..19: mol_type = other RNA
cgtccgggagggaggtgga

SEQ ID NO: 1790 - RNA, 19 nt, synthetic construct
  source 1..19: mol_type = other RNA
gtccgggagggaggtggag

SEQ ID NO: 1791 - RNA, 19 nt, synthetic construct
  source 1..19: mol_type = other RNA
tccgggagggaggtggagg

SEQ ID NO: 1792 - RNA, 19 nt, synthetic construct
  source 1..19: mol_type = other RNA
ccgggagggaggtggaggg

SEQ ID NO: 1793 - RNA, 19 nt, synthetic construct
  source 1..19: mol_type = other RNA
cgggagggaggtggagggg

SEQ ID NO: 1794 - RNA, 19 nt, synthetic construct
  source 1..19: mol_type = other RNA
gggagggaggtggaggggt

SEQ ID NO: 1795 - RNA, 19 nt, synthetic construct
  source 1..19: mol_type = other RNA
ggagggaggtggaggggtc

SEQ ID NO: 1796 - RNA, 19 nt, synthetic construct
  source 1..19: mol_type = other RNA
gagggaggtggaggggtca

SEQ ID NO: 1797 - RNA, 19 nt, synthetic construct
  source 1..19: mol_type = other RNA
agggaggtggaggggtcag

SEQ ID NO: 1798 - RNA, 19 nt, synthetic construct
  source 1..19: mol_type = other RNA
gggaggtggaggggtcagc

SEQ ID NO: 1799 - RNA, 19 nt, synthetic construct
  source 1..19: mol_type = other RNA
ggaggtggaggggtcagcc

SEQ ID NO: 1800 - RNA, 19 nt, synthetic construct
  source 1..19: mol_type = other RNA
gaggtggaggggtcagccc

SEQ ID NO: 1801 - RNA, 19 nt, synthetic construct
  source 1..19: mol_type = other RNA
aggtggaggggtcagcccc

SEQ ID NO: 1802 - RNA, 19 nt, synthetic construct
  source 1..19: mol_type = other RNA
ggtggaggggtcagccccc

SEQ ID NO: 1803 - RNA, 19 nt, synthetic construct
  source 1..19: mol_type = other RNA
gtggaggggtcagcccccc

SEQ ID NO: 1804 - RNA, 19 nt, synthetic construct
  source 1..19: mol_type = other RNA
tggaggggtcagccccccg

SEQ ID NO: 1805 - RNA, 19 nt, synthetic construct
  source 1..19: mol_type = other RNA
ggaggggtcagccccccgc

SEQ ID NO: 1806 - RNA, 19 nt, synthetic construct
  source 1..19: mol_type = other RNA
gaggggtcagccccccgcc

SEQ ID NO: 1807 - RNA, 19 nt, synthetic construct
  source 1..19: mol_type = other RNA
aggggtcagccccccgccc

SEQ ID NO: 1808 - RNA, 19 nt, synthetic construct
  source 1..19: mol_type = other RNA
ggggtcagccccccgcccg

SEQ ID NO: 1809 - RNA, 19 nt, synthetic construct
  source 1..19: mol_type = other RNA
gggtcagccccccgcccgg

SEQ ID NO: 1810 - RNA, 19 nt, synthetic construct
  source 1..19: mol_type = other RNA
ggtcagccccccgcccggc

SEQ ID NO: 1811 - RNA, 19 nt, synthetic construct
  source 1..19: mol_type = other RNA
gtcagccccccgcccggcc

SEQ ID NO: 1812 - RNA, 19 nt, synthetic construct
  source 1..19: mol_type = other RNA
tcagccccccgcccggcca

SEQ ID NO: 1813 - RNA, 19 nt, synthetic construct
  source 1..19: mol_type = other RNA
cagccccccgcccggccag

SEQ ID NO: 1814 - RNA, 19 nt, synthetic construct
  source 1..19: mol_type = other RNA
agccccccgcccggccagc

SEQ ID NO: 1815 - RNA, 19 nt, synthetic construct
  source 1..19: mol_type = other RNA
gccccccgcccggccagcc

SEQ ID NO: 1816 - RNA, 19 nt, synthetic construct
  source 1..19: mol_type = other RNA
ccccccgcccggccagccg

SEQ ID NO: 1817 - RNA, 19 nt, synthetic construct
  source 1..19: mol_type = other RNA
cccccgcccggccagccgc

SEQ ID NO: 1818 - RNA, 19 nt, synthetic construct
  source 1..19: mol_type = other RNA
ccccgcccggccagccgcc

SEQ ID NO: 1819 - RNA, 19 nt, synthetic construct
  source 1..19: mol_type = other RNA
cccgcccggccagccgccc

SEQ ID NO: 1820 - RNA, 19 nt, synthetic construct
  source 1..19: mol_type = other RNA
ccgcccggccagccgcccc

SEQ ID NO: 1821 - RNA, 19 nt, synthetic construct
  source 1..19: mol_type = other RNA
cgcccggccagccgccccg

SEQ ID NO: 1822 - RNA, 19 nt, synthetic construct
  source 1..19: mol_type = other RNA
gcccggccagccgccccgt

SEQ ID NO: 1823 - RNA, 19 nt, synthetic construct
  source 1..19: mol_type = other RNA
cccggccagccgccccgtc

SEQ ID NO: 1824 - RNA, 19 nt, synthetic construct
  source 1..19: mol_type = other RNA
ccggccagccgccccgtcc

SEQ ID NO: 1825 - RNA, 19 nt, synthetic construct
  source 1..19: mol_type = other RNA
cggccagccgccccgtccg

SEQ ID NO: 1826 - RNA, 19 nt, synthetic construct
  source 1..19: mol_type = other RNA
ggccagccgccccgtccgg

SEQ ID NO: 1827 - RNA, 19 nt, synthetic construct
  source 1..19: mol_type = other RNA
gccagccgccccgtccggg

SEQ ID NO: 1828 - RNA, 19 nt, synthetic construct
  source 1..19: mol_type = other RNA
ccagccgccccgtccggga

SEQ ID NO: 1829 - RNA, 19 nt, synthetic construct
  source 1..19: mol_type = other RNA
cagccgccccgtccgggag

SEQ ID NO: 1830 - RNA, 19 nt, synthetic construct
  source 1..19: mol_type = other RNA
agccgccccgtccgggagg

SEQ ID NO: 1831 - RNA, 19 nt, synthetic construct
  source 1..19: mol_type = other RNA
gccgccccgtccgggaggt

SEQ ID NO: 1832 - RNA, 19 nt, synthetic construct
  source 1..19: mol_type = other RNA
ccgccccgtccgggaggtg

SEQ ID NO: 1833 - RNA, 19 nt, synthetic construct
  source 1..19: mol_type = other RNA
cgccccgtccgggaggtga

SEQ ID NO: 1834 - RNA, 19 nt, synthetic construct
  source 1..19: mol_type = other RNA
gccccgtccgggaggtgag

SEQ ID NO: 1835 - RNA, 19 nt, synthetic construct
  source 1..19: mol_type = other RNA
ccccgtccgggaggtgagg

SEQ ID NO: 1836 - RNA, 19 nt, synthetic construct
  source 1..19: mol_type = other RNA
cccgtccgggaggtgaggg

SEQ ID NO: 1837 - RNA, 19 nt, synthetic construct
  source 1..19: mol_type = other RNA
ccgtccgggaggtgagggg

SEQ ID NO: 1838 - RNA, 19 nt, synthetic construct
  source 1..19: mol_type = other RNA
cgtccgggaggtgaggggt

SEQ ID NO: 1839 - RNA, 19 nt, synthetic construct
  source 1..19: mol_type = other RNA
gtccgggaggtgaggggtg

SEQ ID NO: 1840 - RNA, 19 nt, synthetic construct
  source 1..19: mol_type = other RNA
tccgggaggtgaggggtgc

SEQ ID NO: 1841 - RNA, 19 nt, synthetic construct
  source 1..19: mol_type = other RNA
ccgggaggtgaggggtgcc

SEQ ID NO: 1842 - RNA, 19 nt, synthetic construct
  source 1..19: mol_type = other RNA
cgggaggtgaggggtgcct

SEQ ID NO: 1843 - RNA, 19 nt, synthetic construct
  source 1..19: mol_type = other RNA
gggaggtgaggggtgcctc

SEQ ID NO: 1844 - RNA, 19 nt, synthetic construct
  source 1..19: mol_type = other RNA
ggaggtgaggggtgcctct

SEQ ID NO: 1845 - RNA, 19 nt, synthetic construct
  source 1..19: mol_type = other RNA
gaggtgaggggtgcctctg

SEQ ID NO: 1846 - RNA, 19 nt, synthetic construct
  source 1..19: mol_type = other RNA
aggtgaggggtgcctctgc

SEQ ID NO: 1847 - RNA, 19 nt, synthetic construct
  source 1..19: mol_type = other RNA
ggtgaggggtgcctctgcc

SEQ ID NO: 1848 - RNA, 19 nt, synthetic construct
  source 1..19: mol_type = other RNA
gtgaggggtgcctctgccc

SEQ ID NO: 1849 - RNA, 19 nt, synthetic construct
  source 1..19: mol_type = other RNA
tgaggggtgcctctgccca

SEQ ID NO: 1850 - RNA, 19 nt, synthetic construct
  source 1..19: mol_type = other RNA
gaggggtgcctctgcccag

SEQ ID NO: 1851 - RNA, 19 nt, synthetic construct
  source 1..19: mol_type = other RNA
aggggtgcctctgcccagc

SEQ ID NO: 1852 - RNA, 19 nt, synthetic construct
  source 1..19: mol_type = other RNA
ggggtgcctctgcccagcc

SEQ ID NO: 1853 - RNA, 19 nt, synthetic construct
  source 1..19: mol_type = other RNA
gggtgcctctgcccagccg

SEQ ID NO: 1854 - RNA, 19 nt, synthetic construct
  source 1..19: mol_type = other RNA
ggtgcctctgcccagccgc

SEQ ID NO: 1855 - RNA, 19 nt, synthetic construct
  source 1..19: mol_type = other RNA
gtgcctctgcccagccgcc

SEQ ID NO: 1856 - RNA, 19 nt, synthetic construct
  source 1..19: mol_type = other RNA
tgcctctgcccagccgccc

SEQ ID NO: 1857 - RNA, 19 nt, synthetic construct
  source 1..19: mol_type = other RNA
gcctctgcccagccgcccc

SEQ ID NO: 1858 - RNA, 19 nt, synthetic construct
  source 1..19: mol_type = other RNA
cctctgcccagccgcccct

SEQ ID NO: 1859 - RNA, 19 nt, synthetic construct
  source 1..19: mol_type = other RNA
ctctgcccagccgccccta

SEQ ID NO: 1860 - RNA, 19 nt, synthetic construct
  source 1..19: mol_type = other RNA
tctgcccagccgcccctac

SEQ ID NO: 1861 - RNA, 19 nt, synthetic construct
  source 1..19: mol_type = other RNA
ctgcccagccgcccctact

SEQ ID NO: 1862 - RNA, 19 nt, synthetic construct
  source 1..19: mol_type = other RNA
tgcccagccgcccctactg

SEQ ID NO: 1863 - RNA, 19 nt, synthetic construct
  source 1..19: mol_type = other RNA
gcccagccgcccctactgg

SEQ ID NO: 1864 - RNA, 19 nt, synthetic construct
  source 1..19: mol_type = other RNA
cccagccgcccctactggg

SEQ ID NO: 1865 - RNA, 19 nt, synthetic construct
  source 1..19: mol_type = other RNA
ccagccgcccctactggga

SEQ ID NO: 1866 - RNA, 19 nt, synthetic construct
  source 1..19: mol_type = other RNA
cagccgcccctactgggaa

SEQ ID NO: 1867 - RNA, 19 nt, synthetic construct
  source 1..19: mol_type = other RNA
agccgcccctactgggaag

SEQ ID NO: 1868 - RNA, 19 nt, synthetic construct
  source 1..19: mol_type = other RNA
gccgcccctactgggaagt

SEQ ID NO: 1869 - RNA, 19 nt, synthetic construct
  source 1..19: mol_type = other RNA
ccgcccctactgggaagtg

SEQ ID NO: 1870 - RNA, 19 nt, synthetic construct
  source 1..19: mol_type = other RNA
cgcccctactgggaagtga

SEQ ID NO: 1871 - RNA, 19 nt, synthetic construct
  source 1..19: mol_type = other RNA
gcccctactgggaagtgag

SEQ ID NO: 1872 - RNA, 19 nt, synthetic construct
  source 1..19: mol_type = other RNA
cccctactgggaagtgagg

SEQ ID NO: 1873 - RNA, 19 nt, synthetic construct
  source 1..19: mol_type = other RNA
ccctactgggaagtgagga

SEQ ID NO: 1874 - RNA, 19 nt, synthetic construct
  source 1..19: mol_type = other RNA
cctactgggaagtgaggag

SEQ ID NO: 1875 - RNA, 19 nt, synthetic construct
  source 1..19: mol_type = other RNA
ctactgggaagtgaggagc

SEQ ID NO: 1876 - RNA, 19 nt, synthetic construct
  source 1..19: mol_type = other RNA
tactgggaagtgaggagcc

SEQ ID NO: 1877 - RNA, 19 nt, synthetic construct
  source 1..19: mol_type = other RNA
actgggaagtgaggagccc

SEQ ID NO: 1878 - RNA, 19 nt, synthetic construct
  source 1..19: mol_type = other RNA
ctgggaagtgaggagcccc

SEQ ID NO: 1879 - RNA, 19 nt, synthetic construct
  source 1..19: mol_type = other RNA
tgggaagtgaggagcccct

SEQ ID NO: 1880 - RNA, 19 nt, synthetic construct
  source 1..19: mol_type = other RNA
gggaagtgaggagcccctc

SEQ ID NO: 1881 - RNA, 19 nt, synthetic construct
  source 1..19: mol_type = other RNA
ggaagtgaggagcccctct

SEQ ID NO: 1882 - RNA, 19 nt, synthetic construct
  source 1..19: mol_type = other RNA
gaagtgaggagcccctctg

SEQ ID NO: 1883 - RNA, 19 nt, synthetic construct
  source 1..19: mol_type = other RNA
aagtgaggagcccctctgc

SEQ ID NO: 1884 - RNA, 19 nt, synthetic construct
  source 1..19: mol_type = other RNA
agtgaggagcccctctgcc

SEQ ID NO: 1885 - RNA, 19 nt, synthetic construct
  source 1..19: mol_type = other RNA
gtgaggagcccctctgccc

SEQ ID NO: 1886 - RNA, 19 nt, synthetic construct
  source 1..19: mol_type = other RNA
tgaggagcccctctgcccg

SEQ ID NO: 1887 - RNA, 19 nt, synthetic construct
  source 1..19: mol_type = other RNA
gaggagcccctctgcccgg

SEQ ID NO: 1888 - RNA, 19 nt, synthetic construct
  source 1..19: mol_type = other RNA
aggagcccctctgcccggc

SEQ ID NO: 1889 - RNA, 19 nt, synthetic construct
  source 1..19: mol_type = other RNA
ggagcccctctgcccggcc

SEQ ID NO: 1890 - RNA, 19 nt, synthetic construct
  source 1..19: mol_type = other RNA
gagcccctctgcccggcca

SEQ ID NO: 1891 - RNA, 19 nt, synthetic construct
  source 1..19: mol_type = other RNA
agcccctctgcccggccac

SEQ ID NO: 1892 - RNA, 19 nt, synthetic construct
  source 1..19: mol_type = other RNA
gcccctctgcccggccacc

SEQ ID NO: 1893 - RNA, 19 nt, synthetic construct
  source 1..19: mol_type = other RNA
cccctctgcccggccacca

SEQ ID NO: 1894 - RNA, 19 nt, synthetic construct
  source 1..19: mol_type = other RNA
ccctctgcccggccaccac

SEQ ID NO: 1895 - RNA, 19 nt, synthetic construct
  source 1..19: mol_type = other RNA
cctctgcccggccaccacc

SEQ ID NO: 1896 - RNA, 19 nt, synthetic construct
  source 1..19: mol_type = other RNA
ctctgcccggccaccaccc

SEQ ID NO: 1897 - RNA, 19 nt, synthetic construct
  source 1..19: mol_type = other RNA
tctgcccggccaccacccc

SEQ ID NO: 1898 - RNA, 19 nt, synthetic construct
  source 1..19: mol_type = other RNA
ctgcccggccaccacccca

SEQ ID NO: 1899 - RNA, 19 nt, synthetic construct
  source 1..19: mol_type = other RNA
tgcccggccaccaccccat

SEQ ID NO: 1900 - RNA, 19 nt, synthetic construct
  source 1..19: mol_type = other RNA
gcccggccaccaccccatc

SEQ ID NO: 1901 - RNA, 19 nt, synthetic construct
  source 1..19: mol_type = other RNA
cccggccaccaccccatct

SEQ ID NO: 1902 - RNA, 19 nt, synthetic construct
  source 1..19: mol_type = other RNA
ccggccaccaccccatctg

SEQ ID NO: 1903 - RNA, 19 nt, synthetic construct
  source 1..19: mol_type = other RNA
cggccaccaccccatctgg

SEQ ID NO: 1904 - RNA, 19 nt, synthetic construct
  source 1..19: mol_type = other RNA
ggccaccaccccatctggg

SEQ ID NO: 1905 - RNA, 19 nt, synthetic construct
  source 1..19: mol_type = other RNA
gccaccaccccatctggga

SEQ ID NO: 1906 - RNA, 19 nt, synthetic construct
  source 1..19: mol_type = other RNA
ccaccaccccatctgggaa

SEQ ID NO: 1907 - RNA, 19 nt, synthetic construct
  source 1..19: mol_type = other RNA
caccaccccatctgggaag

SEQ ID NO: 1908 - RNA, 19 nt, synthetic construct
  source 1..19: mol_type = other RNA
accaccccatctgggaagt

SEQ ID NO: 1909 - RNA, 19 nt, synthetic construct
  source 1..19: mol_type = other RNA
ccaccccatctgggaagtg

SEQ ID NO: 1910 - RNA, 19 nt, synthetic construct
  source 1..19: mol_type = other RNA
caccccatctgggaagtgt

SEQ ID NO: 1911 - RNA, 19 nt, synthetic construct
  source 1..19: mol_type = other RNA
accccatctgggaagtgta

SEQ ID NO: 1912 - RNA, 19 nt, synthetic construct
  source 1..19: mol_type = other RNA
ccccatctgggaagtgtac

SEQ ID NO: 1913 - RNA, 19 nt, synthetic construct
  source 1..19: mol_type = other RNA
cccatctgggaagtgtacc

SEQ ID NO: 1914 - RNA, 19 nt, synthetic construct
  source 1..19: mol_type = other RNA
ccatctgggaagtgtaccc

SEQ ID NO: 1915 - RNA, 19 nt, synthetic construct
  source 1..19: mol_type = other RNA
catctgggaagtgtaccca

SEQ ID NO: 1916 - RNA, 19 nt, synthetic construct
  source 1..19: mol_type = other RNA
atctgggaagtgtacccaa

SEQ ID NO: 1917 - RNA, 19 nt, synthetic construct
  source 1..19: mol_type = other RNA
tctgggaagtgtacccaat

SEQ ID NO: 1918 - RNA, 19 nt, synthetic construct
  source 1..19: mol_type = other RNA
ctgggaagtgtacccaata

SEQ ID NO: 1919 - RNA, 19 nt, synthetic construct
  source 1..19: mol_type = other RNA
tgggaagtgtacccaatag

SEQ ID NO: 1920 - RNA, 19 nt, synthetic construct
  source 1..19: mol_type = other RNA
gggaagtgtacccaatagc

SEQ ID NO: 1921 - RNA, 19 nt, synthetic construct
  source 1..19: mol_type = other RNA
ggaagtgtacccaatagct

SEQ ID NO: 1922 - RNA, 19 nt, synthetic construct
  source 1..19: mol_type = other RNA
gaagtgtacccaatagctc

SEQ ID NO: 1923 - RNA, 19 nt, synthetic construct
  source 1..19: mol_type = other RNA
aagtgtacccaatagctca

SEQ ID NO: 1924 - RNA, 19 nt, synthetic construct
  source 1..19: mol_type = other RNA
agtgtacccaatagctcat

SEQ ID NO: 1925 - RNA, 19 nt, synthetic construct
  source 1..19: mol_type = other RNA
gtgtacccaatagctcatt

SEQ ID NO: 1926 - RNA, 19 nt, synthetic construct
  source 1..19: mol_type = other RNA
tgtacccaatagctcattg

SEQ ID NO: 1927 - RNA, 19 nt, synthetic construct
  source 1..19: mol_type = other RNA
gtacccaatagctcattga

SEQ ID NO: 1928 - RNA, 19 nt, synthetic construct
  source 1..19: mol_type = other RNA
tacccaatagctcattgag

SEQ ID NO: 1929 - RNA, 19 nt, synthetic construct
  source 1..19: mol_type = other RNA
acccaatagctcattgaga

SEQ ID NO: 1930 - RNA, 19 nt, synthetic construct
  source 1..19: mol_type = other RNA
cccaatagctcattgagaa

SEQ ID NO: 1931 - RNA, 19 nt, synthetic construct
  source 1..19: mol_type = other RNA
ccaatagctcattgagaac

SEQ ID NO: 1932 - RNA, 19 nt, synthetic construct
  source 1..19: mol_type = other RNA
caatagctcattgagaacg

SEQ ID NO: 1933 - RNA, 19 nt, synthetic construct
  source 1..19: mol_type = other RNA
aatagctcattgagaacgg

SEQ ID NO: 1934 - RNA, 19 nt, synthetic construct
  source 1..19: mol_type = other RNA
atagctcattgagaacggg

SEQ ID NO: 1935 - RNA, 19 nt, synthetic construct
  source 1..19: mol_type = other RNA
tagctcattgagaacgggc

SEQ ID NO: 1936 - RNA, 19 nt, synthetic construct
  source 1..19: mol_type = other RNA
agctcattgagaacgggcc

SEQ ID NO: 1937 - RNA, 19 nt, synthetic construct
  source 1..19: mol_type = other RNA
gctcattgagaacgggcca

SEQ ID NO: 1938 - RNA, 19 nt, synthetic construct
  source 1..19: mol_type = other RNA
ctcattgagaacgggccat

SEQ ID NO: 1939 - RNA, 19 nt, synthetic construct
  source 1..19: mol_type = other RNA
tcattgagaacgggccatg

SEQ ID NO: 1940 - RNA, 19 nt, synthetic construct
  source 1..19: mol_type = other RNA
cattgagaacgggccatga

SEQ ID NO: 1941 - RNA, 19 nt, synthetic construct
  source 1..19: mol_type = other RNA
attgagaacgggccatgag

SEQ ID NO: 1942 - RNA, 19 nt, synthetic construct
  source 1..19: mol_type = other RNA
ttgagaacgggccatgagg

SEQ ID NO: 1943 - RNA, 19 nt, synthetic construct
  source 1..19: mol_type = other RNA
tgagaacgggccatgagga

SEQ ID NO: 1944 - RNA, 19 nt, synthetic construct
  source 1..19: mol_type = other RNA
gagaacgggccatgaggac

SEQ ID NO: 1945 - RNA, 19 nt, synthetic construct
  source 1..19: mol_type = other RNA
agaacgggccatgaggaca

SEQ ID NO: 1946 - RNA, 19 nt, synthetic construct
  source 1..19: mol_type = other RNA
gaacgggccatgaggacaa

SEQ ID NO: 1947 - RNA, 19 nt, synthetic construct
  source 1..19: mol_type = other RNA
aacgggccatgaggacaat

SEQ ID NO: 1948 - RNA, 19 nt, synthetic construct
  source 1..19: mol_type = other RNA
acgggccatgaggacaatg

SEQ ID NO: 1949 - RNA, 19 nt, synthetic construct
  source 1..19: mol_type = other RNA
cgggccatgaggacaatgg

SEQ ID NO: 1950 - RNA, 19 nt, synthetic construct
  source 1..19: mol_type = other RNA
gggccatgaggacaatggc

SEQ ID NO: 1951 - RNA, 19 nt, synthetic construct
  source 1..19: mol_type = other RNA
ggccatgaggacaatggcg

SEQ ID NO: 1952 - RNA, 19 nt, synthetic construct
  source 1..19: mol_type = other RNA
gccatgaggacaatggcgg

SEQ ID NO: 1953 - RNA, 19 nt, synthetic construct
  source 1..19: mol_type = other RNA
ccatgaggacaatggcggt

SEQ ID NO: 1954 - RNA, 19 nt, synthetic construct
  source 1..19: mol_type = other RNA
catgaggacaatggcggtt

SEQ ID NO: 1955 - RNA, 19 nt, synthetic construct
  source 1..19: mol_type = other RNA
atgaggacaatggcggttt

SEQ ID NO: 1956 - RNA, 19 nt, synthetic construct
  source 1..19: mol_type = other RNA
tgaggacaatggcggtttt

SEQ ID NO: 1957 - RNA, 19 nt, synthetic construct
  source 1..19: mol_type = other RNA
gaggacaatggcggttttg

SEQ ID NO: 1958 - RNA, 19 nt, synthetic construct
  source 1..19: mol_type = other RNA
aggacaatggcggttttgt

SEQ ID NO: 1959 - RNA, 19 nt, synthetic construct
  source 1..19: mol_type = other RNA
ggacaatggcggttttgtg

SEQ ID NO: 1960 - RNA, 19 nt, synthetic construct
  source 1..19: mol_type = other RNA
gacaatggcggttttgtgg

SEQ ID NO: 1961 - RNA, 19 nt, synthetic construct
  source 1..19: mol_type = other RNA
acaatggcggttttgtgga

SEQ ID NO: 1962 - RNA, 19 nt, synthetic construct
  source 1..19: mol_type = other RNA
caatggcggttttgtggaa

SEQ ID NO: 1963 - RNA, 19 nt, synthetic construct
  source 1..19: mol_type = other RNA
aatggcggttttgtggaat

SEQ ID NO: 1964 - RNA, 19 nt, synthetic construct
  source 1..19: mol_type = other RNA
atggcggttttgtggaata

SEQ ID NO: 1965 - RNA, 19 nt, synthetic construct
  source 1..19: mol_type = other RNA
tggcggttttgtggaatag

SEQ ID NO: 1966 - RNA, 19 nt, synthetic construct
  source 1..19: mol_type = other RNA
ggcggttttgtggaataga

SEQ ID NO: 1967 - RNA, 19 nt, synthetic construct
  source 1..19: mol_type = other RNA
gcggttttgtggaatagaa

SEQ ID NO: 1968 - RNA, 19 nt, synthetic construct
  source 1..19: mol_type = other RNA
cggttttgtggaatagaaa

SEQ ID NO: 1969 - RNA, 19 nt, synthetic construct
  source 1..19: mol_type = other RNA
ggttttgtggaatagaaag

SEQ ID NO: 1970 - RNA, 19 nt, synthetic construct
  source 1..19: mol_type = other RNA
gttttgtggaatagaaagg

SEQ ID NO: 1971 - RNA, 19 nt, synthetic construct
  source 1..19: mol_type = other RNA
ttttgtggaatagaaaggg

SEQ ID NO: 1972 - RNA, 19 nt, synthetic construct
  source 1..19: mol_type = other RNA
tttgtggaatagaaagggg

SEQ ID NO: 1973 - RNA, 19 nt, synthetic construct
  source 1..19: mol_type = other RNA
ttgtggaatagaaaggggg

SEQ ID NO: 1974 - RNA, 19 nt, synthetic construct
  source 1..19: mol_type = other RNA
tgtggaatagaaagggggg

SEQ ID NO: 1975 - RNA, 19 nt, synthetic construct
  source 1..19: mol_type = other RNA
gtggaatagaaagggggga

SEQ ID NO: 1976 - RNA, 19 nt, synthetic construct
  source 1..19: mol_type = other RNA
tggaatagaaaggggggaa

SEQ ID NO: 1977 - RNA, 19 nt, synthetic construct
  source 1..19: mol_type = other RNA
ggaatagaaaggggggaaa

SEQ ID NO: 1978 - RNA, 19 nt, synthetic construct
  source 1..19: mol_type = other RNA
gaatagaaaggggggaaag

SEQ ID NO: 1979 - RNA, 19 nt, synthetic construct
  source 1..19: mol_type = other RNA
aatagaaaggggggaaagg

SEQ ID NO: 1980 - RNA, 19 nt, synthetic construct
  source 1..19: mol_type = other RNA
atagaaaggggggaaaggt

SEQ ID NO: 1981 - RNA, 19 nt, synthetic construct
  source 1..19: mol_type = other RNA
tagaaaggggggaaaggtg

SEQ ID NO: 1982 - RNA, 19 nt, synthetic construct
  source 1..19: mol_type = other RNA
agaaaggggggaaaggtgg

SEQ ID NO: 1983 - RNA, 19 nt, synthetic construct
  source 1..19: mol_type = other RNA
gaaaggggggaaaggtggg

SEQ ID NO: 1984 - RNA, 19 nt, synthetic construct
  source 1..19: mol_type = other RNA
aaaggggggaaaggtgggg

SEQ ID NO: 1985 - RNA, 19 nt, synthetic construct
  source 1..19: mol_type = other RNA
aaggggggaaaggtgggga

SEQ ID NO: 1986 - RNA, 19 nt, synthetic construct
  source 1..19: mol_type = other RNA
aggggggaaaggtggggaa

SEQ ID NO: 1987 - RNA, 19 nt, synthetic construct
  source 1..19: mol_type = other RNA
ggggggaaaggtggggaaa

SEQ ID NO: 1988 - RNA, 19 nt, synthetic construct
  source 1..19: mol_type = other RNA
gggggaaaggtggggaaaa

SEQ ID NO: 1989 - RNA, 19 nt, synthetic construct
  source 1..19: mol_type = other RNA
ggggaaaggtggggaaaag

SEQ ID NO: 1990 - RNA, 19 nt, synthetic construct
  source 1..19: mol_type = other RNA
gggaaaggtggggaaaaga

SEQ ID NO: 1991 - RNA, 19 nt, synthetic construct
  source 1..19: mol_type = other RNA
ggaaaggtggggaaaagat

SEQ ID NO: 1992 - RNA, 19 nt, synthetic construct
  source 1..19: mol_type = other RNA
gaaaggtggggaaaagatt

SEQ ID NO: 1993 - RNA, 19 nt, synthetic construct
  source 1..19: mol_type = other RNA
aaaggtggggaaaagattg

SEQ ID NO: 1994 - RNA, 19 nt, synthetic construct
  source 1..19: mol_type = other RNA
aaggtggggaaaagattga

SEQ ID NO: 1995 - RNA, 19 nt, synthetic construct
  source 1..19: mol_type = other RNA
aggtggggaaaagattgag

SEQ ID NO: 1996 - RNA, 19 nt, synthetic construct
  source 1..19: mol_type = other RNA
ggtggggaaaagattgaga

SEQ ID NO: 1997 - RNA, 19 nt, synthetic construct
  source 1..19: mol_type = other RNA
gtggggaaaagattgagaa

SEQ ID NO: 1998 - RNA, 19 nt, synthetic construct
  source 1..19: mol_type = other RNA
tggggaaaagattgagaaa

SEQ ID NO: 1999 - RNA, 19 nt, synthetic construct
  source 1..19: mol_type = other RNA
ggggaaaagattgagaaat

SEQ ID NO: 2000 - RNA, 19 nt, synthetic construct
  source 1..19: mol_type = other RNA
gggaaaagattgagaaatc

SEQ ID NO: 2001 - RNA, 19 nt, synthetic construct
  source 1..19: mol_type = other RNA
ggaaaagattgagaaatcg

SEQ ID NO: 2002 - RNA, 19 nt, synthetic construct
  source 1..19: mol_type = other RNA
gaaaagattgagaaatcgg

SEQ ID NO: 2003 - RNA, 19 nt, synthetic construct
  source 1..19: mol_type = other RNA
aaaagattgagaaatcgga

SEQ ID NO: 2004 - RNA, 19 nt, synthetic construct
  source 1..19: mol_type = other RNA
aaagattgagaaatcggat

SEQ ID NO: 2005 - RNA, 19 nt, synthetic construct
  source 1..19: mol_type = other RNA
aagattgagaaatcggatg

SEQ ID NO: 2006 - RNA, 19 nt, synthetic construct
  source 1..19: mol_type = other RNA
agattgagaaatcggatgg

SEQ ID NO: 2007 - RNA, 19 nt, synthetic construct
  source 1..19: mol_type = other RNA
gattgagaaatcggatggt

SEQ ID NO: 2008 - RNA, 19 nt, synthetic construct
  source 1..19: mol_type = other RNA
attgagaaatcggatggtt

SEQ ID NO: 2009 - RNA, 19 nt, synthetic construct
  source 1..19: mol_type = other RNA
ttgagaaatcggatggttg

SEQ ID NO: 2010 - RNA, 19 nt, synthetic construct
  source 1..19: mol_type = other RNA
tgagaaatcggatggttgc

SEQ ID NO: 2011 - RNA, 19 nt, synthetic construct
  source 1..19: mol_type = other RNA
gagaaatcggatggttgcc

SEQ ID NO: 2012 - RNA, 19 nt, synthetic construct
  source 1..19: mol_type = other RNA
agaaatcggatggttgcct

SEQ ID NO: 2013 - RNA, 19 nt, synthetic construct
  source 1..19: mol_type = other RNA
gaaatcggatggttgcctt

SEQ ID NO: 2014 - RNA, 19 nt, synthetic construct
  source 1..19: mol_type = other RNA
aaatcggatggttgccttg

SEQ ID NO: 2015 - RNA, 19 nt, synthetic construct
  source 1..19: mol_type = other RNA
aatcggatggttgccttgt

SEQ ID NO: 2016 - RNA, 19 nt, synthetic construct
  source 1..19: mol_type = other RNA
atcggatggttgccttgtc

SEQ ID NO: 2017 - RNA, 19 nt, synthetic construct
  source 1..19: mol_type = other RNA
tcggatggttgccttgtct

SEQ ID NO: 2018 - RNA, 19 nt, synthetic construct
  source 1..19: mol_type = other RNA
cggatggttgccttgtctg

SEQ ID NO: 2019 - RNA, 19 nt, synthetic construct
  source 1..19: mol_type = other RNA
ggatggttgccttgtctgt

SEQ ID NO: 2020 - RNA, 19 nt, synthetic construct
  source 1..19: mol_type = other RNA
gatggttgccttgtctgtg

SEQ ID NO: 2021 - RNA, 19 nt, synthetic construct
  source 1..19: mol_type = other RNA
atggttgccttgtctgtgt

SEQ ID NO: 2022 - RNA, 19 nt, synthetic construct
  source 1..19: mol_type = other RNA
tggttgccttgtctgtgtg

SEQ ID NO: 2023 - RNA, 19 nt, synthetic construct
  source 1..19: mol_type = other RNA
ggttgccttgtctgtgtgg

SEQ ID NO: 2024 - RNA, 19 nt, synthetic construct
  source 1..19: mol_type = other RNA
gttgccttgtctgtgtgga

SEQ ID NO: 2025 - RNA, 19 nt, synthetic construct
  source 1..19: mol_type = other RNA
ttgccttgtctgtgtggaa

SEQ ID NO: 2026 - RNA, 19 nt, synthetic construct
  source 1..19: mol_type = other RNA
tgccttgtctgtgtggaaa

SEQ ID NO: 2027 - RNA, 19 nt, synthetic construct
  source 1..19: mol_type = other RNA
gccttgtctgtgtggaaag

SEQ ID NO: 2028 - RNA, 19 nt, synthetic construct
  source 1..19: mol_type = other RNA
ccttgtctgtgtggaaaga

SEQ ID NO: 2029 - RNA, 19 nt, synthetic construct
  source 1..19: mol_type = other RNA
cttgtctgtgtggaaagaa

SEQ ID NO: 2030 - RNA, 19 nt, synthetic construct
  source 1..19: mol_type = other RNA
ttgtctgtgtggaaagaag

SEQ ID NO: 2031 - RNA, 19 nt, synthetic construct
  source 1..19: mol_type = other RNA
tgtctgtgtggaaagaagt

SEQ ID NO: 2032 - RNA, 19 nt, synthetic construct
  source 1..19: mol_type = other RNA
gtctgtgtggaaagaagta

SEQ ID NO: 2033 - RNA, 19 nt, synthetic construct
  source 1..19: mol_type = other RNA
tctgtgtggaaagaagtag

SEQ ID NO: 2034 - RNA, 19 nt, synthetic construct
  source 1..19: mol_type = other RNA
ctgtgtggaaagaagtaga

SEQ ID NO: 2035 - RNA, 19 nt, synthetic construct
  source 1..19: mol_type = other RNA
tgtgtggaaagaagtagac

SEQ ID NO: 2036 - RNA, 19 nt, synthetic construct
  source 1..19: mol_type = other RNA
gtgtggaaagaagtagaca

SEQ ID NO: 2037 - RNA, 19 nt, synthetic construct
  source 1..19: mol_type = other RNA
tgtggaaagaagtagacat

SEQ ID NO: 2038 - RNA, 19 nt, synthetic construct
  source 1..19: mol_type = other RNA
gtggaaagaagtagacatg

SEQ ID NO: 2039 - RNA, 19 nt, synthetic construct
  source 1..19: mol_type = other RNA
tggaaagaagtagacatgg

SEQ ID NO: 2040 - RNA, 19 nt, synthetic construct
  source 1..19: mol_type = other RNA
ggaaagaagtagacatggg

SEQ ID NO: 2041 - RNA, 19 nt, synthetic construct
  source 1..19: mol_type = other RNA
gaaagaagtagacatggga

SEQ ID NO: 2042 - RNA, 19 nt, synthetic construct
  source 1..19: mol_type = other RNA
aaagaagtagacatgggag

SEQ ID NO: 2043 - RNA, 19 nt, synthetic construct
  source 1..19: mol_type = other RNA
aagaagtagacatgggaga

SEQ ID NO: 2044 - RNA, 19 nt, synthetic construct
  source 1..19: mol_type = other RNA
agaagtagacatgggagac

SEQ ID NO: 2045 - RNA, 19 nt, synthetic construct
  source 1..19: mol_type = other RNA
gaagtagacatgggagact

SEQ ID NO: 2046 - RNA, 19 nt, synthetic construct
  source 1..19: mol_type = other RNA
aagtagacatgggagactt

SEQ ID NO: 2047 - RNA, 19 nt, synthetic construct
  source 1..19: mol_type = other RNA
agtagacatgggagacttt

SEQ ID NO: 2048 - RNA, 19 nt, synthetic construct
  source 1..19: mol_type = other RNA
gtagacatgggagactttt

SEQ ID NO: 2049 - RNA, 19 nt, synthetic construct
  source 1..19: mol_type = other RNA
tagacatgggagacttttc

SEQ ID NO: 2050 - RNA, 19 nt, synthetic construct
  source 1..19: mol_type = other RNA
agacatgggagacttttca

SEQ ID NO: 2051 - RNA, 19 nt, synthetic construct
  source 1..19: mol_type = other RNA
gacatgggagacttttcat

SEQ ID NO: 2052 - RNA, 19 nt, synthetic construct
  source 1..19: mol_type = other RNA
acatgggagacttttcatt

SEQ ID NO: 2053 - RNA, 19 nt, synthetic construct
  source 1..19: mol_type = other RNA
catgggagacttttcattt

SEQ ID NO: 2054 - RNA, 19 nt, synthetic construct
  source 1..19: mol_type = other RNA
atgggagacttttcatttt

SEQ ID NO: 2055 - RNA, 19 nt, synthetic construct
  source 1..19: mol_type = other RNA
tgggagacttttcattttg

SEQ ID NO: 2056 - RNA, 19 nt, synthetic construct
  source 1..19: mol_type = other RNA
gggagacttttcattttgt

SEQ ID NO: 2057 - RNA, 19 nt, synthetic construct
  source 1..19: mol_type = other RNA
ggagacttttcattttgtt

SEQ ID NO: 2058 - RNA, 19 nt, synthetic construct
  source 1..19: mol_type = other RNA
gagacttttcattttgttc

SEQ ID NO: 2059 - RNA, 19 nt, synthetic construct
  source 1..19: mol_type = other RNA
agacttttcattttgttct

SEQ ID NO: 2060 - RNA, 19 nt, synthetic construct
  source 1..19: mol_type = other RNA
gacttttcattttgttctg

SEQ ID NO: 2061 - RNA, 19 nt, synthetic construct
  source 1..19: mol_type = other RNA
acttttcattttgttctgt

SEQ ID NO: 2062 - RNA, 19 nt, synthetic construct
  source 1..19: mol_type = other RNA
cttttcattttgttctgta

SEQ ID NO: 2063 - RNA, 19 nt, synthetic construct
  source 1..19: mol_type = other RNA
ttttcattttgttctgtac

SEQ ID NO: 2064 - RNA, 19 nt, synthetic construct
  source 1..19: mol_type = other RNA
tttcattttgttctgtact

SEQ ID NO: 2065 - RNA, 19 nt, synthetic construct
  source 1..19: mol_type = other RNA
ttcattttgttctgtacta

SEQ ID NO: 2066 - RNA, 19 nt, synthetic construct
  source 1..19: mol_type = other RNA
tcattttgttctgtactaa

SEQ ID NO: 2067 - RNA, 19 nt, synthetic construct
  source 1..19: mol_type = other RNA
cattttgttctgtactaag

SEQ ID NO: 2068 - RNA, 19 nt, synthetic construct
  source 1..19: mol_type = other RNA
attttgttctgtactaaga

SEQ ID NO: 2069 - RNA, 19 nt, synthetic construct
  source 1..19: mol_type = other RNA
ttttgttctgtactaagaa

SEQ ID NO: 2070 - RNA, 19 nt, synthetic construct
  source 1..19: mol_type = other RNA
tttgttctgtactaagaaa

SEQ ID NO: 2071 - RNA, 19 nt, synthetic construct
  source 1..19: mol_type = other RNA
ttgttctgtactaagaaaa

SEQ ID NO: 2072 - RNA, 19 nt, synthetic construct
  source 1..19: mol_type = other RNA
tgttctgtactaagaaaaa

SEQ ID NO: 2073 - RNA, 19 nt, synthetic construct
  source 1..19: mol_type = other RNA
gttctgtactaagaaaaat

SEQ ID NO: 2074 - RNA, 19 nt, synthetic construct
  source 1..19: mol_type = other RNA
ttctgtactaagaaaaatt

SEQ ID NO: 2075 - RNA, 19 nt, synthetic construct
  source 1..19: mol_type = other RNA
tctgtactaagaaaaattc

SEQ ID NO: 2076 - RNA, 19 nt, synthetic construct
  source 1..19: mol_type = other RNA
ctgtactaagaaaaattct

SEQ ID NO: 2077 - RNA, 19 nt, synthetic construct
  source 1..19: mol_type = other RNA
tgtactaagaaaaattctt

SEQ ID NO: 2078 - RNA, 19 nt, synthetic construct
  source 1..19: mol_type = other RNA
gtactaagaaaaattcttc

SEQ ID NO: 2079 - RNA, 19 nt, synthetic construct
  source 1..19: mol_type = other RNA
tactaagaaaaattcttct

SEQ ID NO: 2080 - RNA, 19 nt, synthetic construct
  source 1..19: mol_type = other RNA
actaagaaaaattcttctg

SEQ ID NO: 2081 - RNA, 19 nt, synthetic construct
  source 1..19: mol_type = other RNA
ctaagaaaaattcttctgc

SEQ ID NO: 2082 - RNA, 19 nt, synthetic construct
  source 1..19: mol_type = other RNA
taagaaaaattcttctgcc

SEQ ID NO: 2083 - RNA, 19 nt, synthetic construct
  source 1..19: mol_type = other RNA
aagaaaaattcttctgcct

SEQ ID NO: 2084 - RNA, 19 nt, synthetic construct
  source 1..19: mol_type = other RNA
agaaaaattcttctgcctt

SEQ ID NO: 2085 - RNA, 19 nt, synthetic construct
  source 1..19: mol_type = other RNA
gaaaaattcttctgccttg

SEQ ID NO: 2086 - RNA, 19 nt, synthetic construct
  source 1..19: mol_type = other RNA
aaaaattcttctgccttgg

SEQ ID NO: 2087 - RNA, 19 nt, synthetic construct
  source 1..19: mol_type = other RNA
aaaattcttctgccttggg

SEQ ID NO: 2088 - RNA, 19 nt, synthetic construct
  source 1..19: mol_type = other RNA
aaattcttctgccttggga

SEQ ID NO: 2089 - RNA, 19 nt, synthetic construct
  source 1..19: mol_type = other RNA
aattcttctgccttgggat

SEQ ID NO: 2090 - RNA, 19 nt, synthetic construct
  source 1..19: mol_type = other RNA
attcttctgccttgggatc

SEQ ID NO: 2091 - RNA, 19 nt, synthetic construct
  source 1..19: mol_type = other RNA
ttcttctgccttgggatcc

SEQ ID NO: 2092 - RNA, 19 nt, synthetic construct
  source 1..19: mol_type = other RNA
tcttctgccttgggatcct

SEQ ID NO: 2093 - RNA, 19 nt, synthetic construct
  source 1..19: mol_type = other RNA
cttctgccttgggatcctg

SEQ ID NO: 2094 - RNA, 19 nt, synthetic construct
  source 1..19: mol_type = other RNA
ttctgccttgggatcctgt

SEQ ID NO: 2095 - RNA, 19 nt, synthetic construct
  source 1..19: mol_type = other RNA
tctgccttgggatcctgtt

SEQ ID NO: 2096 - RNA, 19 nt, synthetic construct
  source 1..19: mol_type = other RNA
ctgccttgggatcctgttg

SEQ ID NO: 2097 - RNA, 19 nt, synthetic construct
  source 1..19: mol_type = other RNA
tgccttgggatcctgttga

SEQ ID NO: 2098 - RNA, 19 nt, synthetic construct
  source 1..19: mol_type = other RNA
gccttgggatcctgttgat

SEQ ID NO: 2099 - RNA, 19 nt, synthetic construct
  source 1..19: mol_type = other RNA
ccttgggatcctgttgatc

SEQ ID NO: 2100 - RNA, 19 nt, synthetic construct
  source 1..19: mol_type = other RNA
cttgggatcctgttgatct

SEQ ID NO: 2101 - RNA, 19 nt, synthetic construct
  source 1..19: mol_type = other RNA
ttgggatcctgttgatctg

SEQ ID NO: 2102 - RNA, 19 nt, synthetic construct
  source 1..19: mol_type = other RNA
tgggatcctgttgatctgt

SEQ ID NO: 2103 - RNA, 19 nt, synthetic construct
  source 1..19: mol_type = other RNA
gggatcctgttgatctgtg

SEQ ID NO: 2104 - RNA, 19 nt, synthetic construct
  source 1..19: mol_type = other RNA
ggatcctgttgatctgtga

SEQ ID NO: 2105 - RNA, 19 nt, synthetic construct
  source 1..19: mol_type = other RNA
gatcctgttgatctgtgac

SEQ ID NO: 2106 - RNA, 19 nt, synthetic construct
  source 1..19: mol_type = other RNA
atcctgttgatctgtgacc

SEQ ID NO: 2107 - RNA, 19 nt, synthetic construct
  source 1..19: mol_type = other RNA
tcctgttgatctgtgacct

SEQ ID NO: 2108 - RNA, 19 nt, synthetic construct
  source 1..19: mol_type = other RNA
cctgttgatctgtgacctt

SEQ ID NO: 2109 - RNA, 19 nt, synthetic construct
  source 1..19: mol_type = other RNA
ctgttgatctgtgacctta

SEQ ID NO: 2110 - RNA, 19 nt, synthetic construct
  source 1..19: mol_type = other RNA
tgttgatctgtgaccttac

SEQ ID NO: 2111 - RNA, 19 nt, synthetic construct
  source 1..19: mol_type = other RNA
gttgatctgtgaccttacc

SEQ ID NO: 2112 - RNA, 19 nt, synthetic construct
  source 1..19: mol_type = other RNA
ttgatctgtgaccttaccc

SEQ ID NO: 2113 - RNA, 19 nt, synthetic construct
  source 1..19: mol_type = other RNA
tgatctgtgaccttacccc

SEQ ID NO: 2114 - RNA, 19 nt, synthetic construct
  source 1..19: mol_type = other RNA
gatctgtgaccttaccccc

SEQ ID NO: 2115 - RNA, 19 nt, synthetic construct
  source 1..19: mol_type = other RNA
atctgtgaccttaccccca

SEQ ID NO: 2116 - RNA, 19 nt, synthetic construct
  source 1..19: mol_type = other RNA
tctgtgaccttacccccaa

SEQ ID NO: 2117 - RNA, 19 nt, synthetic construct
  source 1..19: mol_type = other RNA
ctgtgaccttacccccaac

SEQ ID NO: 2118 - RNA, 19 nt, synthetic construct
  source 1..19: mol_type = other RNA
tgtgaccttacccccaacc

SEQ ID NO: 2119 - RNA, 19 nt, synthetic construct
  source 1..19: mol_type = other RNA
gtgaccttacccccaaccc

SEQ ID NO: 2120 - RNA, 19 nt, synthetic construct
  source 1..19: mol_type = other RNA
tgaccttacccccaaccct

SEQ ID NO: 2121 - RNA, 19 nt, synthetic construct
  source 1..19: mol_type = other RNA
gaccttacccccaaccctg

SEQ ID NO: 2122 - RNA, 19 nt, synthetic construct
  source 1..19: mol_type = other RNA
accttacccccaaccctgt

SEQ ID NO: 2123 - RNA, 19 nt, synthetic construct
  source 1..19: mol_type = other RNA
ccttacccccaaccctgtg

SEQ ID NO: 2124 - RNA, 19 nt, synthetic construct
  source 1..19: mol_type = other RNA
cttacccccaaccctgtgc

SEQ ID NO: 2125 - RNA, 19 nt, synthetic construct
  source 1..19: mol_type = other RNA
ttacccccaaccctgtgct

SEQ ID NO: 2126 - RNA, 19 nt, synthetic construct
  source 1..19: mol_type = other RNA
tacccccaaccctgtgctc

SEQ ID NO: 2127 - RNA, 19 nt, synthetic construct
  source 1..19: mol_type = other RNA
acccccaaccctgtgctct

SEQ ID NO: 2128 - RNA, 19 nt, synthetic construct
  source 1..19: mol_type = other RNA
cccccaaccctgtgctctc

SEQ ID NO: 2129 - RNA, 19 nt, synthetic construct
  source 1..19: mol_type = other RNA
ccccaaccctgtgctctct

SEQ ID NO: 2130 - RNA, 19 nt, synthetic construct
  source 1..19: mol_type = other RNA
cccaaccctgtgctctctg

SEQ ID NO: 2131 - RNA, 19 nt, synthetic construct
  source 1..19: mol_type = other RNA
ccaaccctgtgctctctga

SEQ ID NO: 2132 - RNA, 19 nt, synthetic construct
  source 1..19: mol_type = other RNA
caaccctgtgctctctgaa

SEQ ID NO: 2133 - RNA, 19 nt, synthetic construct
  source 1..19: mol_type = other RNA
aaccctgtgctctctgaaa

SEQ ID NO: 2134 - RNA, 19 nt, synthetic construct
  source 1..19: mol_type = other RNA
accctgtgctctctgaaac

SEQ ID NO: 2135 - RNA, 19 nt, synthetic construct
  source 1..19: mol_type = other RNA
ccctgtgctctctgaaaca

SEQ ID NO: 2136 - RNA, 19 nt, synthetic construct
  source 1..19: mol_type = other RNA
cctgtgctctctgaaacat

SEQ ID NO: 2137 - RNA, 19 nt, synthetic construct
  source 1..19: mol_type = other RNA
ctgtgctctctgaaacatg

SEQ ID NO: 2138 - RNA, 19 nt, synthetic construct
  source 1..19: mol_type = other RNA
tgtgctctctgaaacatgt

SEQ ID NO: 2139 - RNA, 19 nt, synthetic construct
  source 1..19: mol_type = other RNA
gtgctctctgaaacatgtg

SEQ ID NO: 2140 - RNA, 19 nt, synthetic construct
  source 1..19: mol_type = other RNA
tgctctctgaaacatgtgc

SEQ ID NO: 2141 - RNA, 19 nt, synthetic construct
  source 1..19: mol_type = other RNA
gctctctgaaacatgtgct

SEQ ID NO: 2142 - RNA, 19 nt, synthetic construct
  source 1..19: mol_type = other RNA
ctctctgaaacatgtgctg

SEQ ID NO: 2143 - RNA, 19 nt, synthetic construct
  source 1..19: mol_type = other RNA
tctctgaaacatgtgctgt

SEQ ID NO: 2144 - RNA, 19 nt, synthetic construct
  source 1..19: mol_type = other RNA
ctctgaaacatgtgctgtg

SEQ ID NO: 2145 - RNA, 19 nt, synthetic construct
  source 1..19: mol_type = other RNA
tctgaaacatgtgctgtgt

SEQ ID NO: 2146 - RNA, 19 nt, synthetic construct
  source 1..19: mol_type = other RNA
ctgaaacatgtgctgtgtc

SEQ ID NO: 2147 - RNA, 19 nt, synthetic construct
  source 1..19: mol_type = other RNA
tgaaacatgtgctgtgtcc

SEQ ID NO: 2148 - RNA, 19 nt, synthetic construct
  source 1..19: mol_type = other RNA
gaaacatgtgctgtgtcca

SEQ ID NO: 2149 - RNA, 19 nt, synthetic construct
  source 1..19: mol_type = other RNA
aaacatgtgctgtgtccac

SEQ ID NO: 2150 - RNA, 19 nt, synthetic construct
  source 1..19: mol_type = other RNA
aacatgtgctgtgtccact

SEQ ID NO: 2151 - RNA, 19 nt, synthetic construct
  source 1..19: mol_type = other RNA
acatgtgctgtgtccactc

SEQ ID NO: 2152 - RNA, 19 nt, synthetic construct
  source 1..19: mol_type = other RNA
catgtgctgtgtccactca

SEQ ID NO: 2153 - RNA, 19 nt, synthetic construct
  source 1..19: mol_type = other RNA
atgtgctgtgtccactcag

SEQ ID NO: 2154 - RNA, 19 nt, synthetic construct
  source 1..19: mol_type = other RNA
tgtgctgtgtccactcagg

SEQ ID NO: 2155 - RNA, 19 nt, synthetic construct
  source 1..19: mol_type = other RNA
gtgctgtgtccactcaggg

SEQ ID NO: 2156 - RNA, 19 nt, synthetic construct
  source 1..19: mol_type = other RNA
tgctgtgtccactcagggt

SEQ ID NO: 2157 - RNA, 19 nt, synthetic construct
  source 1..19: mol_type = other RNA
gctgtgtccactcagggtt

SEQ ID NO: 2158 - RNA, 19 nt, synthetic construct
  source 1..19: mol_type = other RNA
ctgtgtccactcagggtta

SEQ ID NO: 2159 - RNA, 19 nt, synthetic construct
  source 1..19: mol_type = other RNA
tgtgtccactcagggttaa

SEQ ID NO: 2160 - RNA, 19 nt, synthetic construct
  source 1..19: mol_type = other RNA
gtgtccactcagggttaaa

SEQ ID NO: 2161 - RNA, 19 nt, synthetic construct
  source 1..19: mol_type = other RNA
tgtccactcagggttaaat

SEQ ID NO: 2162 - RNA, 19 nt, synthetic construct
  source 1..19: mol_type = other RNA
gtccactcagggttaaatg

SEQ ID NO: 2163 - RNA, 19 nt, synthetic construct
  source 1..19: mol_type = other RNA
tccactcagggttaaatgg

SEQ ID NO: 2164 - RNA, 19 nt, synthetic construct
  source 1..19: mol_type = other RNA
ccactcagggttaaatgga

SEQ ID NO: 2165 - RNA, 19 nt, synthetic construct
  source 1..19: mol_type = other RNA
cactcagggttaaatggat

SEQ ID NO: 2166 - RNA, 19 nt, synthetic construct
  source 1..19: mol_type = other RNA
actcagggttaaatggatt

SEQ ID NO: 2167 - RNA, 19 nt, synthetic construct
  source 1..19: mol_type = other RNA
ctcagggttaaatggatta

SEQ ID NO: 2168 - RNA, 19 nt, synthetic construct
  source 1..19: mol_type = other RNA
tcagggttaaatggattaa

SEQ ID NO: 2169 - RNA, 19 nt, synthetic construct
  source 1..19: mol_type = other RNA
cagggttaaatggattaag

SEQ ID NO: 2170 - RNA, 19 nt, synthetic construct
  source 1..19: mol_type = other RNA
agggttaaatggattaagg

SEQ ID NO: 2171 - RNA, 19 nt, synthetic construct
  source 1..19: mol_type = other RNA
gggttaaatggattaaggg

SEQ ID NO: 2172 - RNA, 19 nt, synthetic construct
  source 1..19: mol_type = other RNA
ggttaaatggattaagggc

SEQ ID NO: 2173 - RNA, 19 nt, synthetic construct
  source 1..19: mol_type = other RNA
gttaaatggattaagggcg

SEQ ID NO: 2174 - RNA, 19 nt, synthetic construct
  source 1..19: mol_type = other RNA
ttaaatggattaagggcgg

SEQ ID NO: 2175 - RNA, 19 nt, synthetic construct
  source 1..19: mol_type = other RNA
taaatggattaagggcggt

SEQ ID NO: 2176 - RNA, 19 nt, synthetic construct
  source 1..19: mol_type = other RNA
aaatggattaagggcggtg

SEQ ID NO: 2177 - RNA, 19 nt, synthetic construct
  source 1..19: mol_type = other RNA
aatggattaagggcggtgc

SEQ ID NO: 2178 - RNA, 19 nt, synthetic construct
  source 1..19: mol_type = other RNA
atggattaagggcggtgca

SEQ ID NO: 2179 - RNA, 19 nt, synthetic construct
  source 1..19: mol_type = other RNA
tggattaagggcggtgcaa

SEQ ID NO: 2180 - RNA, 19 nt, synthetic construct
  source 1..19: mol_type = other RNA
ggattaagggcggtgcaag

SEQ ID NO: 2181 - RNA, 19 nt, synthetic construct
  source 1..19: mol_type = other RNA
gattaagggcggtgcaagg

SEQ ID NO: 2182 - RNA, 19 nt, synthetic construct
  source 1..19: mol_type = other RNA
attaagggcggtgcaaggt

SEQ ID NO: 2183 - RNA, 19 nt, synthetic construct
  source 1..19: mol_type = other RNA
ttaagggcggtgcaaggtg

SEQ ID NO: 2184 - RNA, 19 nt, synthetic construct
  source 1..19: mol_type = other RNA
taagggcggtgcaaggtgt

SEQ ID NO: 2185 - RNA, 19 nt, synthetic construct
  source 1..19: mol_type = other RNA
aagggcggtgcaaggtgtg

SEQ ID NO: 2186 - RNA, 19 nt, synthetic construct
  source 1..19: mol_type = other RNA
agggcggtgcaaggtgtgc

SEQ ID NO: 2187 - RNA, 19 nt, synthetic construct
  source 1..19: mol_type = other RNA
gggcggtgcaaggtgtgct

SEQ ID NO: 2188 - RNA, 19 nt, synthetic construct
  source 1..19: mol_type = other RNA
ggcggtgcaaggtgtgctt

SEQ ID NO: 2189 - RNA, 19 nt, synthetic construct
  source 1..19: mol_type = other RNA
gcggtgcaaggtgtgcttt

SEQ ID NO: 2190 - RNA, 19 nt, synthetic construct
  source 1..19: mol_type = other RNA
cggtgcaaggtgtgctttg

SEQ ID NO: 2191 - RNA, 19 nt, synthetic construct
  source 1..19: mol_type = other RNA
ggtgcaaggtgtgctttgt

SEQ ID NO: 2192 - RNA, 19 nt, synthetic construct
  source 1..19: mol_type = other RNA
gtgcaaggtgtgctttgtt

SEQ ID NO: 2193 - RNA, 19 nt, synthetic construct
  source 1..19: mol_type = other RNA
tgcaaggtgtgctttgtta

SEQ ID NO: 2194 - RNA, 19 nt, synthetic construct
  source 1..19: mol_type = other RNA
gcaaggtgtgctttgttaa

SEQ ID NO: 2195 - RNA, 19 nt, synthetic construct
  source 1..19: mol_type = other RNA
caaggtgtgctttgttaaa

SEQ ID NO: 2196 - RNA, 19 nt, synthetic construct
  source 1..19: mol_type = other RNA
aaggtgtgctttgttaaac

SEQ ID NO: 2197 - RNA, 19 nt, synthetic construct
  source 1..19: mol_type = other RNA
aggtgtgctttgttaaaca

SEQ ID NO: 2198 - RNA, 19 nt, synthetic construct
  source 1..19: mol_type = other RNA
ggtgtgctttgttaaacag

SEQ ID NO: 2199 - RNA, 19 nt, synthetic construct
  source 1..19: mol_type = other RNA
gtgtgctttgttaaacaga

SEQ ID NO: 2200 - RNA, 19 nt, synthetic construct
  source 1..19: mol_type = other RNA
tgtgctttgttaaacagat

SEQ ID NO: 2201 - RNA, 19 nt, synthetic construct
  source 1..19: mol_type = other RNA
gtgctttgttaaacagatg

SEQ ID NO: 2202 - RNA, 19 nt, synthetic construct
  source 1..19: mol_type = other RNA
tgctttgttaaacagatgc

SEQ ID NO: 2203 - RNA, 19 nt, synthetic construct
  source 1..19: mol_type = other RNA
gctttgttaaacagatgct

SEQ ID NO: 2204 - RNA, 19 nt, synthetic construct
  source 1..19: mol_type = other RNA
ctttgttaaacagatgctt

SEQ ID NO: 2205 - RNA, 19 nt, synthetic construct
  source 1..19: mol_type = other RNA
tttgttaaacagatgcttg

SEQ ID NO: 2206 - RNA, 19 nt, synthetic construct
  source 1..19: mol_type = other RNA
ttgttaaacagatgcttga

SEQ ID NO: 2207 - RNA, 19 nt, synthetic construct
  source 1..19: mol_type = other RNA
tgttaaacagatgcttgaa

SEQ ID NO: 2208 - RNA, 19 nt, synthetic construct
  source 1..19: mol_type = other RNA
gttaaacagatgcttgaag

SEQ ID NO: 2209 - RNA, 19 nt, synthetic construct
  source 1..19: mol_type = other RNA
ttaaacagatgcttgaagg

SEQ ID NO: 2210 - RNA, 19 nt, synthetic construct
  source 1..19: mol_type = other RNA
taaacagatgcttgaaggc

SEQ ID NO: 2211 - RNA, 19 nt, synthetic construct
  source 1..19: mol_type = other RNA
aaacagatgcttgaaggca

SEQ ID NO: 2212 - RNA, 19 nt, synthetic construct
  source 1..19: mol_type = other RNA
aacagatgcttgaaggcag

SEQ ID NO: 2213 - RNA, 19 nt, synthetic construct
  source 1..19: mol_type = other RNA
acagatgcttgaaggcagc

SEQ ID NO: 2214 - RNA, 19 nt, synthetic construct
  source 1..19: mol_type = other RNA
cagatgcttgaaggcagca

SEQ ID NO: 2215 - RNA, 19 nt, synthetic construct
  source 1..19: mol_type = other RNA
agatgcttgaaggcagcat

SEQ ID NO: 2216 - RNA, 19 nt, synthetic construct
  source 1..19: mol_type = other RNA
gatgcttgaaggcagcatg

SEQ ID NO: 2217 - RNA, 19 nt, synthetic construct
  source 1..19: mol_type = other RNA
atgcttgaaggcagcatgc

SEQ ID NO: 2218 - RNA, 19 nt, synthetic construct
  source 1..19: mol_type = other RNA
tgcttgaaggcagcatgct

SEQ ID NO: 2219 - RNA, 19 nt, synthetic construct
  source 1..19: mol_type = other RNA
gcttgaaggcagcatgctc

SEQ ID NO: 2220 - RNA, 19 nt, synthetic construct
  source 1..19: mol_type = other RNA
cttgaaggcagcatgctcg

SEQ ID NO: 2221 - RNA, 19 nt, synthetic construct
  source 1..19: mol_type = other RNA
ttgaaggcagcatgctcgt

SEQ ID NO: 2222 - RNA, 19 nt, synthetic construct
  source 1..19: mol_type = other RNA
tgaaggcagcatgctcgtt

SEQ ID NO: 2223 - RNA, 19 nt, synthetic construct
  source 1..19: mol_type = other RNA
gaaggcagcatgctcgtta

SEQ ID NO: 2224 - RNA, 19 nt, synthetic construct
  source 1..19: mol_type = other RNA
aaggcagcatgctcgttaa

SEQ ID NO: 2225 - RNA, 19 nt, synthetic construct
  source 1..19: mol_type = other RNA
aggcagcatgctcgttaag

SEQ ID NO: 2226 - RNA, 19 nt, synthetic construct
  source 1..19: mol_type = other RNA
ggcagcatgctcgttaaga

SEQ ID NO: 2227 - RNA, 19 nt, synthetic construct
  source 1..19: mol_type = other RNA
gcagcatgctcgttaagag

SEQ ID NO: 2228 - RNA, 19 nt, synthetic construct
  source 1..19: mol_type = other RNA
cagcatgctcgttaagagt

SEQ ID NO: 2229 - RNA, 19 nt, synthetic construct
  source 1..19: mol_type = other RNA
agcatgctcgttaagagtc

SEQ ID NO: 2230 - RNA, 19 nt, synthetic construct
  source 1..19: mol_type = other RNA
gcatgctcgttaagagtca

SEQ ID NO: 2231 - RNA, 19 nt, synthetic construct
  source 1..19: mol_type = other RNA
catgctcgttaagagtcat

SEQ ID NO: 2232 - RNA, 19 nt, synthetic construct
  source 1..19: mol_type = other RNA
atgctcgttaagagtcatc

SEQ ID NO: 2233 - RNA, 19 nt, synthetic construct
  source 1..19: mol_type = other RNA
tgctcgttaagagtcatca

SEQ ID NO: 2234 - RNA, 19 nt, synthetic construct
  source 1..19: mol_type = other RNA
gctcgttaagagtcatcac

SEQ ID NO: 2235 - RNA, 19 nt, synthetic construct
  source 1..19: mol_type = other RNA
ctcgttaagagtcatcacc

SEQ ID NO: 2236 - RNA, 19 nt, synthetic construct
  source 1..19: mol_type = other RNA
tcgttaagagtcatcacca

SEQ ID NO: 2237 - RNA, 19 nt, synthetic construct
  source 1..19: mol_type = other RNA
cgttaagagtcatcaccac

SEQ ID NO: 2238 - RNA, 19 nt, synthetic construct
  source 1..19: mol_type = other RNA
gttaagagtcatcaccact

SEQ ID NO: 2239 - RNA, 19 nt, synthetic construct
  source 1..19: mol_type = other RNA
ttaagagtcatcaccactc

SEQ ID NO: 2240 - RNA, 19 nt, synthetic construct
  source 1..19: mol_type = other RNA
taagagtcatcaccactcc

SEQ ID NO: 2241 - RNA, 19 nt, synthetic construct
  source 1..19: mol_type = other RNA
aagagtcatcaccactccc

SEQ ID NO: 2242 - RNA, 19 nt, synthetic construct
  source 1..19: mol_type = other RNA
agagtcatcaccactccct

SEQ ID NO: 2243 - RNA, 19 nt, synthetic construct
  source 1..19: mol_type = other RNA
gagtcatcaccactcccta

SEQ ID NO: 2244 - RNA, 19 nt, synthetic construct
  source 1..19: mol_type = other RNA
agtcatcaccactccctaa

SEQ ID NO: 2245 - RNA, 19 nt, synthetic construct
  source 1..19: mol_type = other RNA
gtcatcaccactccctaat

SEQ ID NO: 2246 - RNA, 19 nt, synthetic construct
  source 1..19: mol_type = other RNA
tcatcaccactccctaatc

SEQ ID NO: 2247 - RNA, 19 nt, synthetic construct
  source 1..19: mol_type = other RNA
catcaccactccctaatct

SEQ ID NO: 2248 - RNA, 19 nt, synthetic construct
  source 1..19: mol_type = other RNA
atcaccactccctaatctc

SEQ ID NO: 2249 - RNA, 19 nt, synthetic construct
  source 1..19: mol_type = other RNA
tcaccactccctaatctca

SEQ ID NO: 2250 - RNA, 19 nt, synthetic construct
  source 1..19: mol_type = other RNA
caccactccctaatctcaa

SEQ ID NO: 2251 - RNA, 19 nt, synthetic construct
  source 1..19: mol_type = other RNA
accactccctaatctcaag

SEQ ID NO: 2252 - RNA, 19 nt, synthetic construct
  source 1..19: mol_type = other RNA
ccactccctaatctcaagt

SEQ ID NO: 2253 - RNA, 19 nt, synthetic construct
  source 1..19: mol_type = other RNA
cactccctaatctcaagta

SEQ ID NO: 2254 - RNA, 19 nt, synthetic construct
  source 1..19: mol_type = other RNA
actccctaatctcaagtac

SEQ ID NO: 2255 - RNA, 19 nt, synthetic construct
  source 1..19: mol_type = other RNA
ctccctaatctcaagtacc

SEQ ID NO: 2256 - RNA, 19 nt, synthetic construct
  source 1..19: mol_type = other RNA
tccctaatctcaagtaccc

SEQ ID NO: 2257 - RNA, 19 nt, synthetic construct
  source 1..19: mol_type = other RNA
ccctaatctcaagtaccca

SEQ ID NO: 2258 - RNA, 19 nt, synthetic construct
  source 1..19: mol_type = other RNA
cctaatctcaagtacccag

SEQ ID NO: 2259 - RNA, 19 nt, synthetic construct
  source 1..19: mol_type = other RNA
ctaatctcaagtacccagg

SEQ ID NO: 2260 - RNA, 19 nt, synthetic construct
  source 1..19: mol_type = other RNA
taatctcaagtacccaggg

SEQ ID NO: 2261 - RNA, 19 nt, synthetic construct
  source 1..19: mol_type = other RNA
aatctcaagtacccaggga

SEQ ID NO: 2262 - RNA, 19 nt, synthetic construct
  source 1..19: mol_type = other RNA
atctcaagtacccagggac

SEQ ID NO: 2263 - RNA, 19 nt, synthetic construct
  source 1..19: mol_type = other RNA
tctcaagtacccagggaca

SEQ ID NO: 2264 - RNA, 19 nt, synthetic construct
  source 1..19: mol_type = other RNA
ctcaagtacccagggacac

SEQ ID NO: 2265 - RNA, 19 nt, synthetic construct
  source 1..19: mol_type = other RNA
tcaagtacccagggacaca

SEQ ID NO: 2266 - RNA, 19 nt, synthetic construct
  source 1..19: mol_type = other RNA
caagtacccagggacacaa

SEQ ID NO: 2267 - RNA, 19 nt, synthetic construct
  source 1..19: mol_type = other RNA
aagtacccagggacacaaa

SEQ ID NO: 2268 - RNA, 19 nt, synthetic construct
  source 1..19: mol_type = other RNA
agtacccagggacacaaac

SEQ ID NO: 2269 - RNA, 19 nt, synthetic construct
  source 1..19: mol_type = other RNA
gtacccagggacacaaaca

SEQ ID NO: 2270 - RNA, 19 nt, synthetic construct
  source 1..19: mol_type = other RNA
tacccagggacacaaacac

SEQ ID NO: 2271 - RNA, 19 nt, synthetic construct
  source 1..19: mol_type = other RNA
acccagggacacaaacacc

SEQ ID NO: 2272 - RNA, 19 nt, synthetic construct
  source 1..19: mol_type = other RNA
cccagggacacaaacacct

SEQ ID NO: 2273 - RNA, 19 nt, synthetic construct
  source 1..19: mol_type = other RNA
ccagggacacaaacacctc

SEQ ID NO: 2274 - RNA, 19 nt, synthetic construct
  source 1..19: mol_type = other RNA
cagggacacaaacacctcg

SEQ ID NO: 2275 - RNA, 19 nt, synthetic construct
  source 1..19: mol_type = other RNA
agggacacaaacacctcgg

SEQ ID NO: 2276 - RNA, 19 nt, synthetic construct
  source 1..19: mol_type = other RNA
gggacacaaacacctcgga

SEQ ID NO: 2277 - RNA, 19 nt, synthetic construct
  source 1..19: mol_type = other RNA
ggacacaaacacctcggaa

SEQ ID NO: 2278 - RNA, 19 nt, synthetic construct
  source 1..19: mol_type = other RNA
gacacaaacacctcggaag

SEQ ID NO: 2279 - RNA, 19 nt, synthetic construct
  source 1..19: mol_type = other RNA
acacaaacacctcggaagg

SEQ ID NO: 2280 - RNA, 19 nt, synthetic construct
  source 1..19: mol_type = other RNA
cacaaacacctcggaaggc

SEQ ID NO: 2281 - RNA, 19 nt, synthetic construct
  source 1..19: mol_type = other RNA
acaaacacctcggaaggcc

SEQ ID NO: 2282 - RNA, 19 nt, synthetic construct
  source 1..19: mol_type = other RNA
caaacacctcggaaggccg

SEQ ID NO: 2283 - RNA, 19 nt, synthetic construct
  source 1..19: mol_type = other RNA
aaacacctcggaaggccgc

SEQ ID NO: 2284 - RNA, 19 nt, synthetic construct
  source 1..19: mol_type = other RNA
aacacctcggaaggccgca

SEQ ID NO: 2285 - RNA, 19 nt, synthetic construct
  source 1..19: mol_type = other RNA
acacctcggaaggccgcag

SEQ ID NO: 2286 - RNA, 19 nt, synthetic construct
  source 1..19: mol_type = other RNA
cacctcggaaggccgcagg

SEQ ID NO: 2287 - RNA, 19 nt, synthetic construct
  source 1..19: mol_type = other RNA
acctcggaaggccgcaggg

SEQ ID NO: 2288 - RNA, 19 nt, synthetic construct
  source 1..19: mol_type = other RNA
cctcggaaggccgcagggt

SEQ ID NO: 2289 - RNA, 19 nt, synthetic construct
  source 1..19: mol_type = other RNA
ctcggaaggccgcagggtc

SEQ ID NO: 2290 - RNA, 19 nt, synthetic construct
  source 1..19: mol_type = other RNA
tcggaaggccgcagggtcc

SEQ ID NO: 2291 - RNA, 19 nt, synthetic construct
  source 1..19: mol_type = other RNA
cggaaggccgcagggtcct

SEQ ID NO: 2292 - RNA, 19 nt, synthetic construct
  source 1..19: mol_type = other RNA
ggaaggccgcagggtcctc

SEQ ID NO: 2293 - RNA, 19 nt, synthetic construct
  source 1..19: mol_type = other RNA
gaaggccgcagggtcctct

SEQ ID NO: 2294 - RNA, 19 nt, synthetic construct
  source 1..19: mol_type = other RNA
aaggccgcagggtcctctg

SEQ ID NO: 2295 - RNA, 19 nt, synthetic construct
  source 1..19: mol_type = other RNA
aggccgcagggtcctctgc

SEQ ID NO: 2296 - RNA, 19 nt, synthetic construct
  source 1..19: mol_type = other RNA
ggccgcagggtcctctgcc

SEQ ID NO: 2297 - RNA, 19 nt, synthetic construct
  source 1..19: mol_type = other RNA
gccgcagggtcctctgcct

SEQ ID NO: 2298 - RNA, 19 nt, synthetic construct
  source 1..19: mol_type = other RNA
ccgcagggtcctctgccta

SEQ ID NO: 2299 - RNA, 19 nt, synthetic construct
  source 1..19: mol_type = other RNA
cgcagggtcctctgcctag

SEQ ID NO: 2300 - RNA, 19 nt, synthetic construct
  source 1..19: mol_type = other RNA
gcagggtcctctgcctagg

SEQ ID NO: 2301 - RNA, 19 nt, synthetic construct
  source 1..19: mol_type = other RNA
cagggtcctctgcctagga

SEQ ID NO: 2302 - RNA, 19 nt, synthetic construct
  source 1..19: mol_type = other RNA
agggtcctctgcctaggaa

SEQ ID NO: 2303 - RNA, 19 nt, synthetic construct
  source 1..19: mol_type = other RNA
gggtcctctgcctaggaaa

SEQ ID NO: 2304 - RNA, 19 nt, synthetic construct
  source 1..19: mol_type = other RNA
ggtcctctgcctaggaaaa

SEQ ID NO: 2305 - RNA, 19 nt, synthetic construct
  source 1..19: mol_type = other RNA
gtcctctgcctaggaaaac

SEQ ID NO: 2306 - RNA, 19 nt, synthetic construct
  source 1..19: mol_type = other RNA
tcctctgcctaggaaaacc

SEQ ID NO: 2307 - RNA, 19 nt, synthetic construct
  source 1..19: mol_type = other RNA
cctctgcctaggaaaacca

SEQ ID NO: 2308 - RNA, 19 nt, synthetic construct
  source 1..19: mol_type = other RNA
ctctgcctaggaaaaccag

SEQ ID NO: 2309 - RNA, 19 nt, synthetic construct
  source 1..19: mol_type = other RNA
tctgcctaggaaaaccaga

SEQ ID NO: 2310 - RNA, 19 nt, synthetic construct
  source 1..19: mol_type = other RNA
ctgcctaggaaaaccagag

SEQ ID NO: 2311 - RNA, 19 nt, synthetic construct
  source 1..19: mol_type = other RNA
tgcctaggaaaaccagaga

SEQ ID NO: 2312 - RNA, 19 nt, synthetic construct
  source 1..19: mol_type = other RNA
gcctaggaaaaccagagac

SEQ ID NO: 2313 - RNA, 19 nt, synthetic construct
  source 1..19: mol_type = other RNA
cctaggaaaaccagagacc

SEQ ID NO: 2314 - RNA, 19 nt, synthetic construct
  source 1..19: mol_type = other RNA
ctaggaaaaccagagacct

SEQ ID NO: 2315 - RNA, 19 nt, synthetic construct
  source 1..19: mol_type = other RNA
taggaaaaccagagacctt

SEQ ID NO: 2316 - RNA, 19 nt, synthetic construct
  source 1..19: mol_type = other RNA
aggaaaaccagagaccttt

SEQ ID NO: 2317 - RNA, 19 nt, synthetic construct
  source 1..19: mol_type = other RNA
ggaaaaccagagacctttg

SEQ ID NO: 2318 - RNA, 19 nt, synthetic construct
  source 1..19: mol_type = other RNA
gaaaaccagagacctttgt

SEQ ID NO: 2319 - RNA, 19 nt, synthetic construct
  source 1..19: mol_type = other RNA
aaaaccagagacctttgtt

SEQ ID NO: 2320 - RNA, 19 nt, synthetic construct
  source 1..19: mol_type = other RNA
aaaccagagacctttgttc

SEQ ID NO: 2321 - RNA, 19 nt, synthetic construct
  source 1..19: mol_type = other RNA
aaccagagacctttgttca

SEQ ID NO: 2322 - RNA, 19 nt, synthetic construct
  source 1..19: mol_type = other RNA
accagagacctttgttcac

SEQ ID NO: 2323 - RNA, 19 nt, synthetic construct
  source 1..19: mol_type = other RNA
ccagagacctttgttcact

SEQ ID NO: 2324 - RNA, 19 nt, synthetic construct
  source 1..19: mol_type = other RNA
cagagacctttgttcactt

SEQ ID NO: 2325 - RNA, 19 nt, synthetic construct
  source 1..19: mol_type = other RNA
agagacctttgttcacttg

SEQ ID NO: 2326 - RNA, 19 nt, synthetic construct
  source 1..19: mol_type = other RNA
gagacctttgttcacttgt

SEQ ID NO: 2327 - RNA, 19 nt, synthetic construct
  source 1..19: mol_type = other RNA
agacctttgttcacttgtt

SEQ ID NO: 2328 - RNA, 19 nt, synthetic construct
  source 1..19: mol_type = other RNA
gacctttgttcacttgttt

SEQ ID NO: 2329 - RNA, 19 nt, synthetic construct
  source 1..19: mol_type = other RNA
acctttgttcacttgttta

SEQ ID NO: 2330 - RNA, 19 nt, synthetic construct
  source 1..19: mol_type = other RNA
cctttgttcacttgtttat

SEQ ID NO: 2331 - RNA, 19 nt, synthetic construct
  source 1..19: mol_type = other RNA
ctttgttcacttgtttatc

SEQ ID NO: 2332 - RNA, 19 nt, synthetic construct
  source 1..19: mol_type = other RNA
tttgttcacttgtttatct

SEQ ID NO: 2333 - RNA, 19 nt, synthetic construct
  source 1..19: mol_type = other RNA
ttgttcacttgtttatctg

SEQ ID NO: 2334 - RNA, 19 nt, synthetic construct
  source 1..19: mol_type = other RNA
tgttcacttgtttatctgc

SEQ ID NO: 2335 - RNA, 19 nt, synthetic construct
  source 1..19: mol_type = other RNA
gttcacttgtttatctgct

SEQ ID NO: 2336 - RNA, 19 nt, synthetic construct
  source 1..19: mol_type = other RNA
ttcacttgtttatctgctg

SEQ ID NO: 2337 - RNA, 19 nt, synthetic construct
  source 1..19: mol_type = other RNA
tcacttgtttatctgctga

SEQ ID NO: 2338 - RNA, 19 nt, synthetic construct
  source 1..19: mol_type = other RNA
cacttgtttatctgctgac

SEQ ID NO: 2339 - RNA, 19 nt, synthetic construct
  source 1..19: mol_type = other RNA
acttgtttatctgctgacc

SEQ ID NO: 2340 - RNA, 19 nt, synthetic construct
  source 1..19: mol_type = other RNA
cttgtttatctgctgacct

SEQ ID NO: 2341 - RNA, 19 nt, synthetic construct
  source 1..19: mol_type = other RNA
ttgtttatctgctgacctt

SEQ ID NO: 2342 - RNA, 19 nt, synthetic construct
  source 1..19: mol_type = other RNA
tgtttatctgctgaccttc

SEQ ID NO: 2343 - RNA, 19 nt, synthetic construct
  source 1..19: mol_type = other RNA
gtttatctgctgaccttcc

SEQ ID NO: 2344 - RNA, 19 nt, synthetic construct
  source 1..19: mol_type = other RNA
tttatctgctgaccttccc

SEQ ID NO: 2345 - RNA, 19 nt, synthetic construct
  source 1..19: mol_type = other RNA
ttatctgctgaccttccct

SEQ ID NO: 2346 - RNA, 19 nt, synthetic construct
  source 1..19: mol_type = other RNA
tatctgctgaccttccctc

SEQ ID NO: 2347 - RNA, 19 nt, synthetic construct
  source 1..19: mol_type = other RNA
atctgctgaccttccctcc

SEQ ID NO: 2348 - RNA, 19 nt, synthetic construct
  source 1..19: mol_type = other RNA
tctgctgaccttccctcca

SEQ ID NO: 2349 - RNA, 19 nt, synthetic construct
  source 1..19: mol_type = other RNA
ctgctgaccttccctccac

SEQ ID NO: 2350 - RNA, 19 nt, synthetic construct
  source 1..19: mol_type = other RNA
tgctgaccttccctccact

SEQ ID NO: 2351 - RNA, 19 nt, synthetic construct
  source 1..19: mol_type = other RNA
gctgaccttccctccacta

SEQ ID NO: 2352 - RNA, 19 nt, synthetic construct
  source 1..19: mol_type = other RNA
ctgaccttccctccactat

SEQ ID NO: 2353 - RNA, 19 nt, synthetic construct
  source 1..19: mol_type = other RNA
tgaccttccctccactatt

SEQ ID NO: 2354 - RNA, 19 nt, synthetic construct
  source 1..19: mol_type = other RNA
gaccttccctccactattg

SEQ ID NO: 2355 - RNA, 19 nt, synthetic construct
  source 1..19: mol_type = other RNA
accttccctccactattgt

SEQ ID NO: 2356 - RNA, 19 nt, synthetic construct
  source 1..19: mol_type = other RNA
ccttccctccactattgtc

SEQ ID NO: 2357 - RNA, 19 nt, synthetic construct
  source 1..19: mol_type = other RNA
cttccctccactattgtcc

SEQ ID NO: 2358 - RNA, 19 nt, synthetic construct
  source 1..19: mol_type = other RNA
ttccctccactattgtcct

SEQ ID NO: 2359 - RNA, 19 nt, synthetic construct
  source 1..19: mol_type = other RNA
tccctccactattgtccta

SEQ ID NO: 2360 - RNA, 19 nt, synthetic construct
  source 1..19: mol_type = other RNA
ccctccactattgtcctat

SEQ ID NO: 2361 - RNA, 19 nt, synthetic construct
  source 1..19: mol_type = other RNA
cctccactattgtcctatg

SEQ ID NO: 2362 - RNA, 19 nt, synthetic construct
  source 1..19: mol_type = other RNA
ctccactattgtcctatga

SEQ ID NO: 2363 - RNA, 19 nt, synthetic construct
  source 1..19: mol_type = other RNA
tccactattgtcctatgac

SEQ ID NO: 2364 - RNA, 19 nt, synthetic construct
  source 1..19: mol_type = other RNA
ccactattgtcctatgacc

SEQ ID NO: 2365 - RNA, 19 nt, synthetic construct
  source 1..19: mol_type = other RNA
cactattgtcctatgaccc

SEQ ID NO: 2366 - RNA, 19 nt, synthetic construct
  source 1..19: mol_type = other RNA
actattgtcctatgaccct

SEQ ID NO: 2367 - RNA, 19 nt, synthetic construct
  source 1..19: mol_type = other RNA
ctattgtcctatgaccctg

SEQ ID NO: 2368 - RNA, 19 nt, synthetic construct
  source 1..19: mol_type = other RNA
tattgtcctatgaccctgc

SEQ ID NO: 2369 - RNA, 19 nt, synthetic construct
  source 1..19: mol_type = other RNA
attgtcctatgaccctgcc

SEQ ID NO: 2370 - RNA, 19 nt, synthetic construct
  source 1..19: mol_type = other RNA
ttgtcctatgaccctgcca

SEQ ID NO: 2371 - RNA, 19 nt, synthetic construct
  source 1..19: mol_type = other RNA
tgtcctatgaccctgccaa

SEQ ID NO: 2372 - RNA, 19 nt, synthetic construct
  source 1..19: mol_type = other RNA
gtcctatgaccctgccaaa

SEQ ID NO: 2373 - RNA, 19 nt, synthetic construct
  source 1..19: mol_type = other RNA
tcctatgaccctgccaaat

SEQ ID NO: 2374 - RNA, 19 nt, synthetic construct
  source 1..19: mol_type = other RNA
cctatgaccctgccaaatc

SEQ ID NO: 2375 - RNA, 19 nt, synthetic construct
  source 1..19: mol_type = other RNA
ctatgaccctgccaaatcc

SEQ ID NO: 2376 - RNA, 19 nt, synthetic construct
  source 1..19: mol_type = other RNA
tatgaccctgccaaatccc

SEQ ID NO: 2377 - RNA, 19 nt, synthetic construct
  source 1..19: mol_type = other RNA
atgaccctgccaaatcccc

SEQ ID NO: 2378 - RNA, 19 nt, synthetic construct
  source 1..19: mol_type = other RNA
tgaccctgccaaatccccc

SEQ ID NO: 2379 - RNA, 19 nt, synthetic construct
  source 1..19: mol_type = other RNA
gaccctgccaaatccccct

SEQ ID NO: 2380 - RNA, 19 nt, synthetic construct
  source 1..19: mol_type = other RNA
accctgccaaatccccctc

SEQ ID NO: 2381 - RNA, 19 nt, synthetic construct
  source 1..19: mol_type = other RNA
ccctgccaaatccccctct

SEQ ID NO: 2382 - RNA, 19 nt, synthetic construct
  source 1..19: mol_type = other RNA
cctgccaaatccccctctg

SEQ ID NO: 2383 - RNA, 19 nt, synthetic construct
  source 1..19: mol_type = other RNA
ctgccaaatccccctctgt

SEQ ID NO: 2384 - RNA, 19 nt, synthetic construct
  source 1..19: mol_type = other RNA
tgccaaatccccctctgtg

SEQ ID NO: 2385 - RNA, 19 nt, synthetic construct
  source 1..19: mol_type = other RNA
gccaaatccccctctgtga

SEQ ID NO: 2386 - RNA, 19 nt, synthetic construct
  source 1..19: mol_type = other RNA
ccaaatccccctctgtgag

SEQ ID NO: 2387 - RNA, 19 nt, synthetic construct
  source 1..19: mol_type = other RNA
caaatccccctctgtgaga

SEQ ID NO: 2388 - RNA, 19 nt, synthetic construct
  source 1..19: mol_type = other RNA
aaatccccctctgtgagaa

SEQ ID NO: 2389 - RNA, 19 nt, synthetic construct
  source 1..19: mol_type = other RNA
aatccccctctgtgagaaa

SEQ ID NO: 2390 - RNA, 19 nt, synthetic construct
  source 1..19: mol_type = other RNA
atccccctctgtgagaaac

SEQ ID NO: 2391 - RNA, 19 nt, synthetic construct
  source 1..19: mol_type = other RNA
tccccctctgtgagaaaca

SEQ ID NO: 2392 - RNA, 19 nt, synthetic construct
  source 1..19: mol_type = other RNA
ccccctctgtgagaaacac

SEQ ID NO: 2393 - RNA, 19 nt, synthetic construct
  source 1..19: mol_type = other RNA
cccctctgtgagaaacacc

SEQ ID NO: 2394 - RNA, 19 nt, synthetic construct
  source 1..19: mol_type = other RNA
ccctctgtgagaaacaccc

SEQ ID NO: 2395 - RNA, 19 nt, synthetic construct
  source 1..19: mol_type = other RNA
cctctgtgagaaacaccca

SEQ ID NO: 2396 - RNA, 19 nt, synthetic construct
  source 1..19: mol_type = other RNA
ctctgtgagaaacacccaa

SEQ ID NO: 2397 - RNA, 19 nt, synthetic construct
  source 1..19: mol_type = other RNA
tctgtgagaaacacccaag

SEQ ID NO: 2398 - RNA, 19 nt, synthetic construct
  source 1..19: mol_type = other RNA
ctgtgagaaacacccaaga

SEQ ID NO: 2399 - RNA, 19 nt, synthetic construct
  source 1..19: mol_type = other RNA
tgtgagaaacacccaagaa

SEQ ID NO: 2400 - RNA, 19 nt, synthetic construct
  source 1..19: mol_type = other RNA
gtgagaaacacccaagaat

SEQ ID NO: 2401 - RNA, 19 nt, synthetic construct
  source 1..19: mol_type = other RNA
tgagaaacacccaagaatg

SEQ ID NO: 2402 - RNA, 19 nt, synthetic construct
  source 1..19: mol_type = other RNA
gagaaacacccaagaatgg

SEQ ID NO: 2403 - RNA, 19 nt, synthetic construct
  source 1..19: mol_type = other RNA
agaaacacccaagaatggt

SEQ ID NO: 2404 - RNA, 19 nt, synthetic construct
  source 1..19: mol_type = other RNA
gaaacacccaagaatggtc

SEQ ID NO: 2405 - RNA, 19 nt, synthetic construct
  source 1..19: mol_type = other RNA
aaacacccaagaatggtca

SEQ ID NO: 2406 - RNA, 19 nt, synthetic construct
  source 1..19: mol_type = other RNA
aacacccaagaatggtcaa

SEQ ID NO: 2407 - RNA, 19 nt, synthetic construct
  source 1..19: mol_type = other RNA
acacccaagaatggtcaat

SEQ ID NO: 2408 - RNA, 19 nt, synthetic construct
  source 1..19: mol_type = other RNA
cacccaagaatggtcaata

SEQ ID NO: 2409 - RNA, 19 nt, synthetic construct
  source 1..19: mol_type = other RNA
acccaagaatggtcaataa

SEQ ID NO: 2410 - RNA, 19 nt, synthetic construct
  source 1..19: mol_type = other RNA
cccaagaatggtcaataaa

SEQ ID NO: 2411 - RNA, 19 nt, synthetic construct
  source 1..19: mol_type = other RNA
ccaagaatggtcaataaaa

SEQ ID NO: 2412 - RNA, 19 nt, synthetic construct
  source 1..19: mol_type = other RNA
caagaatggtcaataaaaa

SEQ ID NO: 2413 - RNA, 19 nt, synthetic construct
  source 1..19: mol_type = other RNA
aagaatggtcaataaaaaa

SEQ ID NO: 2414 - RNA, 19 nt, synthetic construct
  source 1..19: mol_type = other RNA
agaatggtcaataaaaaat

SEQ ID NO: 2415 - RNA, 19 nt, synthetic construct
  source 1..19: mol_type = other RNA
gaatggtcaataaaaaatt

SEQ ID NO: 2416 - RNA, 19 nt, synthetic construct
  source 1..19: mol_type = other RNA
aatggtcaataaaaaatta

SEQ ID NO: 2417 - RNA, 19 nt, synthetic construct
  source 1..19: mol_type = other RNA
atggtcaataaaaaattaa

SEQ ID NO: 2418 - RNA, 19 nt, synthetic construct
  source 1..19: mol_type = other RNA
tggtcaataaaaaattaaa

SEQ ID NO: 2419 - RNA, 19 nt, synthetic construct
  source 1..19: mol_type = other RNA
ggtcaataaaaaattaaat

SEQ ID NO: 2420 - RNA, 19 nt, synthetic construct
  source 1..19: mol_type = other RNA
gtcaataaaaaattaaata

SEQ ID NO: 2421 - RNA, 19 nt, synthetic construct
  source 1..19: mol_type = other RNA
tcaataaaaaattaaataa

SEQ ID NO: 2422 - RNA, 19 nt, synthetic construct
  source 1..19: mol_type = other RNA
caataaaaaattaaataaa

SEQ ID NO: 2423 - RNA, 19 nt, synthetic construct
  source 1..19: mol_type = other RNA
aataaaaaattaaataaat

SEQ ID NO: 2424 - RNA, 19 nt, synthetic construct
  source 1..19: mol_type = other RNA
ataaaaaattaaataaata

SEQ ID NO: 2425 - RNA, 19 nt, synthetic construct
  source 1..19: mol_type = other RNA
taaaaaattaaataaataa

SEQ ID NO: 2426 - RNA, 19 nt, synthetic construct
  source 1..19: mol_type = other RNA
aaaaaattaaataaataaa

SEQ ID NO: 2427 - RNA, 19 nt, synthetic construct
  source 1..19: mol_type = other RNA
aaaaattaaataaataaat

SEQ ID NO: 2428 - RNA, 19 nt, synthetic construct
  source 1..19: mol_type = other RNA
aaaattaaataaataaata

SEQ ID NO: 2429 - RNA, 19 nt, synthetic construct
  source 1..19: mol_type = other RNA
aaattaaataaataaataa

SEQ ID NO: 2430 - RNA, 19 nt, synthetic construct
  source 1..19: mol_type = other RNA
aattaaataaataaataaa

SEQ ID NO: 2431 - RNA, 19 nt, synthetic construct
  source 1..19: mol_type = other RNA
attaaataaataaataaat

SEQ ID NO: 2432 - RNA, 19 nt, synthetic construct
  source 1..19: mol_type = other RNA
ttaaataaataaataaata

SEQ ID NO: 2433 - RNA, 19 nt, synthetic construct
  source 1..19: mol_type = other RNA
taaataaataaataaataa

SEQ ID NO: 2434 - RNA, 19 nt, synthetic construct
  source 1..19: mol_type = other RNA
aaataaataaataaataaa

SEQ ID NO: 2435 - RNA, 19 nt, synthetic construct
  source 1..19: mol_type = other RNA
aataaataaataaataaat

SEQ ID NO: 2436 - RNA, 19 nt, synthetic construct
  source 1..19: mol_type = other RNA
ataaataaataaataaata

SEQ ID NO: 2437 - RNA, 19 nt, synthetic construct
  source 1..19: mol_type = other RNA
taaataaataaataaataa

SEQ ID NO: 2438 - RNA, 19 nt, synthetic construct
  source 1..19: mol_type = other RNA
aaataaataaataaataaa

SEQ ID NO: 2439 - RNA, 19 nt, synthetic construct
  source 1..19: mol_type = other RNA
aataaataaataaataaat

SEQ ID NO: 2440 - RNA, 19 nt, synthetic construct
  source 1..19: mol_type = other RNA
ataaataaataaataaata

SEQ ID NO: 2441 - RNA, 19 nt, synthetic construct
  source 1..19: mol_type = other RNA
taaataaataaataaataa

SEQ ID NO: 2442 - RNA, 19 nt, synthetic construct
  source 1..19: mol_type = other RNA
aaataaataaataaataaa

SEQ ID NO: 2443 - RNA, 19 nt, synthetic construct
  source 1..19: mol_type = other RNA
aataaataaataaataaaa

SEQ ID NO: 2444 - RNA, 19 nt, synthetic construct
  source 1..19: mol_type = other RNA
ataaataaataaataaaaa

SEQ ID NO: 2445 - RNA, 19 nt, synthetic construct
  source 1..19: mol_type = other RNA
taaataaataaataaaaag

SEQ ID NO: 2446 - RNA, 19 nt, synthetic construct
  source 1..19: mol_type = other RNA
aaataaataaataaaaagt

SEQ ID NO: 2447 - RNA, 19 nt, synthetic construct
  source 1..19: mol_type = other RNA
aataaataaataaaaagta

SEQ ID NO: 2448 - RNA, 19 nt, synthetic construct
  source 1..19: mol_type = other RNA
ggatgtgttgagaacttct

SEQ ID NO: 2449 - RNA, 19 nt, synthetic construct
  source 1..19: mol_type = other RNA
aggatgtgttgagaacttc

SEQ ID NO: 2450 - RNA, 19 nt, synthetic construct
  source 1..19: mol_type = other RNA
aaggatgtgttgagaactt

SEQ ID NO: 2451 - RNA, 19 nt, synthetic construct
  source 1..19: mol_type = other RNA
aaaggatgtgttgagaact

SEQ ID NO: 2452 - RNA, 19 nt, synthetic construct
  source 1..19: mol_type = other RNA
taaaggatgtgttgagaac

SEQ ID NO: 2453 - RNA, 19 nt, synthetic construct
  source 1..19: mol_type = other RNA
ttaaaggatgtgttgagaa

SEQ ID NO: 2454 - RNA, 19 nt, synthetic construct
  source 1..19: mol_type = other RNA
cttaaaggatgtgttgaga

SEQ ID NO: 2455 - RNA, 19 nt, synthetic construct
  source 1..19: mol_type = other RNA
ccttaaaggatgtgttgag

SEQ ID NO: 2456 - RNA, 19 nt, synthetic construct
  source 1..19: mol_type = other RNA
accttaaaggatgtgttga

SEQ ID NO: 2457 - RNA, 19 nt, synthetic construct
  source 1..19: mol_type = other RNA
aaccttaaaggatgtgttg

SEQ ID NO: 2458 - RNA, 19 nt, synthetic construct
  source 1..19: mol_type = other RNA
gaaccttaaaggatgtgtt

SEQ ID NO: 2459 - RNA, 19 nt, synthetic construct
  source 1..19: mol_type = other RNA
ggaaccttaaaggatgtgt

SEQ ID NO: 2460 - RNA, 19 nt, synthetic construct
  source 1..19: mol_type = other RNA
tggaaccttaaaggatgtg

SEQ ID NO: 2461 - RNA, 19 nt, synthetic construct
  source 1..19: mol_type = other RNA
ttggaaccttaaaggatgt

SEQ ID NO: 2462 - RNA, 19 nt, synthetic construct
  source 1..19: mol_type = other RNA
tttggaaccttaaaggatg

SEQ ID NO: 2463 - RNA, 19 nt, synthetic construct
  source 1..19: mol_type = other RNA
gtttggaaccttaaaggat

SEQ ID NO: 2464 - RNA, 19 nt, synthetic construct
  source 1..19: mol_type = other RNA
tgtttggaaccttaaagga

SEQ ID NO: 2465 - RNA, 19 nt, synthetic construct
  source 1..19: mol_type = other RNA
atgtttggaaccttaaagg

SEQ ID NO: 2466 - RNA, 19 nt, synthetic construct
  source 1..19: mol_type = other RNA
gatgtttggaaccttaaag

SEQ ID NO: 2467 - RNA, 19 nt, synthetic construct
  source 1..19: mol_type = other RNA
agatgtttggaaccttaaa

SEQ ID NO: 2468 - RNA, 19 nt, synthetic construct
  source 1..19: mol_type = other RNA
tagatgtttggaaccttaa

SEQ ID NO: 2469 - RNA, 19 nt, synthetic construct
  source 1..19: mol_type = other RNA
gtagatgtttggaacctta

SEQ ID NO: 2470 - RNA, 19 nt, synthetic construct
  source 1..19: mol_type = other RNA
agtagatgtttggaacctt

SEQ ID NO: 2471 - RNA, 19 nt, synthetic construct
  source 1..19: mol_type = other RNA
tagtagatgtttggaacct

SEQ ID NO: 2472 - RNA, 19 nt, synthetic construct
  source 1..19: mol_type = other RNA
ctagtagatgtttggaacc

SEQ ID NO: 2473 - RNA, 19 nt, synthetic construct
  source 1..19: mol_type = other RNA
tctagtagatgtttggaac

SEQ ID NO: 2474 - RNA, 19 nt, synthetic construct
  source 1..19: mol_type = other RNA
ttctagtagatgtttggaa

SEQ ID NO: 2475 - RNA, 19 nt, synthetic construct
  source 1..19: mol_type = other RNA
tttctagtagatgtttgga

SEQ ID NO: 2476 - RNA, 19 nt, synthetic construct
  source 1..19: mol_type = other RNA
ttttctagtagatgtttgg

SEQ ID NO: 2477 - RNA, 19 nt, synthetic construct
  source 1..19: mol_type = other RNA
cttttctagtagatgtttg

SEQ ID NO: 2478 - RNA, 19 nt, synthetic construct
  source 1..19: mol_type = other RNA
ccttttctagtagatgttt

SEQ ID NO: 2479 - RNA, 19 nt, synthetic construct
  source 1..19: mol_type = other RNA
tccttttctagtagatgtt

SEQ ID NO: 2480 - RNA, 19 nt, synthetic construct
  source 1..19: mol_type = other RNA
ctccttttctagtagatgt

SEQ ID NO: 2481 - RNA, 19 nt, synthetic construct
  source 1..19: mol_type = other RNA
actccttttctagtagatg

SEQ ID NO: 2482 - RNA, 19 nt, synthetic construct
  source 1..19: mol_type = other RNA
cactccttttctagtagat

SEQ ID NO: 2483 - RNA, 19 nt, synthetic construct
  source 1..19: mol_type = other RNA
gcactccttttctagtaga

SEQ ID NO: 2484 - RNA, 19 nt, synthetic construct
  source 1..19: mol_type = other RNA
tgcactccttttctagtag

SEQ ID NO: 2485 - RNA, 19 nt, synthetic construct
  source 1..19: mol_type = other RNA
ctgcactccttttctagta

SEQ ID NO: 2486 - RNA, 19 nt, synthetic construct
  source 1..19: mol_type = other RNA
tctgcactccttttctagt

SEQ ID NO: 2487 - RNA, 19 nt, synthetic construct
  source 1..19: mol_type = other RNA
atctgcactccttttctag

SEQ ID NO: 2488 - RNA, 19 nt, synthetic construct
  source 1..19: mol_type = other RNA
aatctgcactccttttcta

SEQ ID NO: 2489 - RNA, 19 nt, synthetic construct
  source 1..19: mol_type = other RNA
aaatctgcactccttttct

SEQ ID NO: 2490 - RNA, 19 nt, synthetic construct
  source 1..19: mol_type = other RNA
taaatctgcactccttttc

SEQ ID NO: 2491 - RNA, 19 nt, synthetic construct
  source 1..19: mol_type = other RNA
ttaaatctgcactcctttt

SEQ ID NO: 2492 - RNA, 19 nt, synthetic construct
  source 1..19: mol_type = other RNA
tttaaatctgcactccttt

SEQ ID NO: 2493 - RNA, 19 nt, synthetic construct
  source 1..19: mol_type = other RNA
gtttaaatctgcactcctt

SEQ ID NO: 2494 - RNA, 19 nt, synthetic construct
  source 1..19: mol_type = other RNA
agtttaaatctgcactcct

SEQ ID NO: 2495 - RNA, 19 nt, synthetic construct
  source 1..19: mol_type = other RNA
cagtttaaatctgcactcc

SEQ ID NO: 2496 - RNA, 19 nt, synthetic construct
  source 1..19: mol_type = other RNA
tcagtttaaatctgcactc

SEQ ID NO: 2497 - RNA, 19 nt, synthetic construct
  source 1..19: mol_type = other RNA
ctcagtttaaatctgcact

SEQ ID NO: 2498 - RNA, 19 nt, synthetic construct
  source 1..19: mol_type = other RNA
actcagtttaaatctgcac

SEQ ID NO: 2499 - RNA, 19 nt, synthetic construct
  source 1..19: mol_type = other RNA
cactcagtttaaatctgca

SEQ ID NO: 2500 - RNA, 19 nt, synthetic construct
  source 1..19: mol_type = other RNA
tcactcagtttaaatctgc

SEQ ID NO: 2501 - RNA, 19 nt, synthetic construct
  source 1..19: mol_type = other RNA
ctcactcagtttaaatctg

SEQ ID NO: 2502 - RNA, 19 nt, synthetic construct
  source 1..19: mol_type = other RNA
cctcactcagtttaaatct

SEQ ID NO: 2503 - RNA, 19 nt, synthetic construct
  source 1..19: mol_type = other RNA
acctcactcagtttaaatc

SEQ ID NO: 2504 - RNA, 19 nt, synthetic construct
  source 1..19: mol_type = other RNA
cacctcactcagtttaaat

SEQ ID NO: 2505 - RNA, 19 nt, synthetic construct
  source 1..19: mol_type = other RNA
acacctcactcagtttaaa

SEQ ID NO: 2506 - RNA, 19 nt, synthetic construct
  source 1..19: mol_type = other RNA
cacacctcactcagtttaa

SEQ ID NO: 2507 - RNA, 19 nt, synthetic construct
  source 1..19: mol_type = other RNA
ccacacctcactcagttta

SEQ ID NO: 2508 - RNA, 19 nt, synthetic construct
  source 1..19: mol_type = other RNA
tccacacctcactcagttt

SEQ ID NO: 2509 - RNA, 19 nt, synthetic construct
  source 1..19: mol_type = other RNA
ctccacacctcactcagtt

SEQ ID NO: 2510 - RNA, 19 nt, synthetic construct
  source 1..19: mol_type = other RNA
actccacacctcactcagt

SEQ ID NO: 2511 - RNA, 19 nt, synthetic construct
  source 1..19: mol_type = other RNA
cactccacacctcactcag

SEQ ID NO: 2512 - RNA, 19 nt, synthetic construct
  source 1..19: mol_type = other RNA
ccactccacacctcactca

SEQ ID NO: 2513 - RNA, 19 nt, synthetic construct
  source 1..19: mol_type = other RNA
cccactccacacctcactc

SEQ ID NO: 2514 - RNA, 19 nt, synthetic construct
  source 1..19: mol_type = other RNA
ccccactccacacctcact

SEQ ID NO: 2515 - RNA, 19 nt, synthetic construct
  source 1..19: mol_type = other RNA
cccccactccacacctcac

SEQ ID NO: 2516 - RNA, 19 nt, synthetic construct
  source 1..19: mol_type = other RNA
tcccccactccacacctca

SEQ ID NO: 2517 - RNA, 19 nt, synthetic construct
  source 1..19: mol_type = other RNA
ttcccccactccacacctc

SEQ ID NO: 2518 - RNA, 19 nt, synthetic construct
  source 1..19: mol_type = other RNA
cttcccccactccacacct

SEQ ID NO: 2519 - RNA, 19 nt, synthetic construct
  source 1..19: mol_type = other RNA
gcttcccccactccacacc

SEQ ID NO: 2520 - RNA, 19 nt, synthetic construct
  source 1..19: mol_type = other RNA
agcttcccccactccacac

SEQ ID NO: 2521 - RNA, 19 nt, synthetic construct
  source 1..19: mol_type = other RNA
cagcttcccccactccaca

SEQ ID NO: 2522 - RNA, 19 nt, synthetic construct
  source 1..19: mol_type = other RNA
tcagcttcccccactccac

SEQ ID NO: 2523 - RNA, 19 nt, synthetic construct
  source 1..19: mol_type = other RNA
gtcagcttcccccactcca

SEQ ID NO: 2524 - RNA, 19 nt, synthetic construct
  source 1..19: mol_type = other RNA
agtcagcttcccccactcc

SEQ ID NO: 2525 - RNA, 19 nt, synthetic construct
  source 1..19: mol_type = other RNA
cagtcagcttcccccactc

SEQ ID NO: 2526 - RNA, 19 nt, synthetic construct
  source 1..19: mol_type = other RNA
acagtcagcttcccccact

SEQ ID NO: 2527 - RNA, 19 nt, synthetic construct
  source 1..19: mol_type = other RNA
cacagtcagcttcccccac

SEQ ID NO: 2528 - RNA, 19 nt, synthetic construct
  source 1..19: mol_type = other RNA
acacagtcagcttccccca

SEQ ID NO: 2529 - RNA, 19 nt, synthetic construct
  source 1..19: mol_type = other RNA
gacacagtcagcttccccc

SEQ ID NO: 2530 - RNA, 19 nt, synthetic construct
  source 1..19: mol_type = other RNA
agacacagtcagcttcccc

SEQ ID NO: 2531 - RNA, 19 nt, synthetic construct
  source 1..19: mol_type = other RNA
cagacacagtcagcttccc

SEQ ID NO: 2532 - RNA, 19 nt, synthetic construct
  source 1..19: mol_type = other RNA
ccagacacagtcagcttcc

SEQ ID NO: 2533 - RNA, 19 nt, synthetic construct
  source 1..19: mol_type = other RNA
tccagacacagtcagcttc

SEQ ID NO: 2534 - RNA, 19 nt, synthetic construct
  source 1..19: mol_type = other RNA
ttccagacacagtcagctt

SEQ ID NO: 2535 - RNA, 19 nt, synthetic construct
  source 1..19: mol_type = other RNA
gttccagacacagtcagct

SEQ ID NO: 2536 - RNA, 19 nt, synthetic construct
  source 1..19: mol_type = other RNA
tgttccagacacagtcagc

SEQ ID NO: 2537 - RNA, 19 nt, synthetic construct
  source 1..19: mol_type = other RNA
ttgttccagacacagtcag

SEQ ID NO: 2538 - RNA, 19 nt, synthetic construct
  source 1..19: mol_type = other RNA
tttgttccagacacagtca

SEQ ID NO: 2539 - RNA, 19 nt, synthetic construct
  source 1..19: mol_type = other RNA
ctttgttccagacacagtc

SEQ ID NO: 2540 - RNA, 19 nt, synthetic construct
  source 1..19: mol_type = other RNA
tctttgttccagacacagt

SEQ ID NO: 2541 - RNA, 19 nt, synthetic construct
  source 1..19: mol_type = other RNA
ttctttgttccagacacag

SEQ ID NO: 2542 - RNA, 19 nt, synthetic construct
  source 1..19: mol_type = other RNA
gttctttgttccagacaca

SEQ ID NO: 2543 - RNA, 19 nt, synthetic construct
  source 1..19: mol_type = other RNA
agttctttgttccagacac

SEQ ID NO: 2544 - RNA, 19 nt, synthetic construct
  source 1..19: mol_type = other RNA
aagttctttgttccagaca

SEQ ID NO: 2545 - RNA, 19 nt, synthetic construct
  source 1..19: mol_type = other RNA
aaagttctttgttccagac

SEQ ID NO: 2546 - RNA, 19 nt, synthetic construct
  source 1..19: mol_type = other RNA
caaagttctttgttccaga

SEQ ID NO: 2547 - RNA, 19 nt, synthetic construct
  source 1..19: mol_type = other RNA
tcaaagttctttgttccag

SEQ ID NO: 2548 - RNA, 19 nt, synthetic construct
  source 1..19: mol_type = other RNA
ctcaaagttctttgttcca

SEQ ID NO: 2549 - RNA, 19 nt, synthetic construct
  source 1..19: mol_type = other RNA
cctcaaagttctttgttcc

SEQ ID NO: 2550 - RNA, 19 nt, synthetic construct
  source 1..19: mol_type = other RNA
tcctcaaagttctttgttc

SEQ ID NO: 2551 - RNA, 19 nt, synthetic construct
  source 1..19: mol_type = other RNA
ttcctcaaagttctttgtt

SEQ ID NO: 2552 - RNA, 19 nt, synthetic construct
  source 1..19: mol_type = other RNA
gttcctcaaagttctttgt

SEQ ID NO: 2553 - RNA, 19 nt, synthetic construct
  source 1..19: mol_type = other RNA
agttcctcaaagttctttg

SEQ ID NO: 2554 - RNA, 19 nt, synthetic construct
  source 1..19: mol_type = other RNA
aagttcctcaaagttcttt

SEQ ID NO: 2555 - RNA, 19 nt, synthetic construct
  source 1..19: mol_type = other RNA
caagttcctcaaagttctt

SEQ ID NO: 2556 - RNA, 19 nt, synthetic construct
  source 1..19: mol_type = other RNA
gcaagttcctcaaagttct

SEQ ID NO: 2557 - RNA, 19 nt, synthetic construct
  source 1..19: mol_type = other RNA
ggcaagttcctcaaagttc

SEQ ID NO: 2558 - RNA, 19 nt, synthetic construct
  source 1..19: mol_type = other RNA
gggcaagttcctcaaagtt

SEQ ID NO: 2559 - RNA, 19 nt, synthetic construct
  source 1..19: mol_type = other RNA
tgggcaagttcctcaaagt

SEQ ID NO: 2560 - RNA, 19 nt, synthetic construct
  source 1..19: mol_type = other RNA
ctgggcaagttcctcaaag

SEQ ID NO: 2561 - RNA, 19 nt, synthetic construct
  source 1..19: mol_type = other RNA
tctgggcaagttcctcaaa

SEQ ID NO: 2562 - RNA, 19 nt, synthetic construct
  source 1..19: mol_type = other RNA
ctctgggcaagttcctcaa

SEQ ID NO: 2563 - RNA, 19 nt, synthetic construct
  source 1..19: mol_type = other RNA
gctctgggcaagttcctca

SEQ ID NO: 2564 - RNA, 19 nt, synthetic construct
  source 1..19: mol_type = other RNA
ggctctgggcaagttcctc

SEQ ID NO: 2565 - RNA, 19 nt, synthetic construct
  source 1..19: mol_type = other RNA
gggctctgggcaagttcct

SEQ ID NO: 2566 - RNA, 19 nt, synthetic construct
  source 1..19: mol_type = other RNA
agggctctgggcaagttcc

SEQ ID NO: 2567 - RNA, 19 nt, synthetic construct
  source 1..19: mol_type = other RNA
cagggctctgggcaagttc

SEQ ID NO: 2568 - RNA, 19 nt, synthetic construct
  source 1..19: mol_type = other RNA
gcagggctctgggcaagtt

SEQ ID NO: 2569 - RNA, 19 nt, synthetic construct
  source 1..19: mol_type = other RNA
tgcagggctctgggcaagt

SEQ ID NO: 2570 - RNA, 19 nt, synthetic construct
  source 1..19: mol_type = other RNA
gtgcagggctctgggcaag

SEQ ID NO: 2571 - RNA, 19 nt, synthetic construct
  source 1..19: mol_type = other RNA
agtgcagggctctgggcaa

SEQ ID NO: 2572 - RNA, 19 nt, synthetic construct
  source 1..19: mol_type = other RNA
gagtgcagggctctgggca

SEQ ID NO: 2573 - RNA, 19 nt, synthetic construct
  source 1..19: mol_type = other RNA
tgagtgcagggctctgggc

SEQ ID NO: 2574 - RNA, 19 nt, synthetic construct
  source 1..19: mol_type = other RNA
atgagtgcagggctctggg

SEQ ID NO: 2575 - RNA, 19 nt, synthetic construct
  source 1..19: mol_type = other RNA
gatgagtgcagggctctgg

SEQ ID NO: 2576 - RNA, 19 nt, synthetic construct
  source 1..19: mol_type = other RNA
tgatgagtgcagggctctg

SEQ ID NO: 2577 - RNA, 19 nt, synthetic construct
  source 1..19: mol_type = other RNA
ctgatgagtgcagggctct

SEQ ID NO: 2578 - RNA, 19 nt, synthetic construct
  source 1..19: mol_type = other RNA
tctgatgagtgcagggctc

SEQ ID NO: 2579 - RNA, 19 nt, synthetic construct
  source 1..19: mol_type = other RNA
gtctgatgagtgcagggct

SEQ ID NO: 2580 - RNA, 19 nt, synthetic construct
  source 1..19: mol_type = other RNA
ggtctgatgagtgcagggc

SEQ ID NO: 2581 - RNA, 19 nt, synthetic construct
  source 1..19: mol_type = other RNA
aggtctgatgagtgcaggg

SEQ ID NO: 2582 - RNA, 19 nt, synthetic construct
  source 1..19: mol_type = other RNA
caggtctgatgagtgcagg

SEQ ID NO: 2583 - RNA, 19 nt, synthetic construct
  source 1..19: mol_type = other RNA
gcaggtctgatgagtgcag

SEQ ID NO: 2584 - RNA, 19 nt, synthetic construct
  source 1..19: mol_type = other RNA
tgcaggtctgatgagtgca

SEQ ID NO: 2585 - RNA, 19 nt, synthetic construct
  source 1..19: mol_type = other RNA
ctgcaggtctgatgagtgc

SEQ ID NO: 2586 - RNA, 19 nt, synthetic construct
  source 1..19: mol_type = other RNA
gctgcaggtctgatgagtg

SEQ ID NO: 2587 - RNA, 19 nt, synthetic construct
  source 1..19: mol_type = other RNA
tgctgcaggtctgatgagt

SEQ ID NO: 2588 - RNA, 19 nt, synthetic construct
  source 1..19: mol_type = other RNA
ctgctgcaggtctgatgag

SEQ ID NO: 2589 - RNA, 19 nt, synthetic construct
  source 1..19: mol_type = other RNA
tctgctgcaggtctgatga

SEQ ID NO: 2590 - RNA, 19 nt, synthetic construct
  source 1..19: mol_type = other RNA
gtctgctgcaggtctgatg

SEQ ID NO: 2591 - RNA, 19 nt, synthetic construct
  source 1..19: mol_type = other RNA
tgtctgctgcaggtctgat

SEQ ID NO: 2592 - RNA, 19 nt, synthetic construct
  source 1..19: mol_type = other RNA
atgtctgctgcaggtctga

SEQ ID NO: 2593 - RNA, 19 nt, synthetic construct
  source 1..19: mol_type = other RNA
aatgtctgctgcaggtctg

SEQ ID NO: 2594 - RNA, 19 nt, synthetic construct
  source 1..19: mol_type = other RNA
caatgtctgctgcaggtct

SEQ ID NO: 2595 - RNA, 19 nt, synthetic construct
  source 1..19: mol_type = other RNA
gcaatgtctgctgcaggtc

SEQ ID NO: 2596 - RNA, 19 nt, synthetic construct
  source 1..19: mol_type = other RNA
tgcaatgtctgctgcaggt

SEQ ID NO: 2597 - RNA, 19 nt, synthetic construct
  source 1..19: mol_type = other RNA
ctgcaatgtctgctgcagg

SEQ ID NO: 2598 - RNA, 19 nt, synthetic construct
  source 1..19: mol_type = other RNA
cctgcaatgtctgctgcag

SEQ ID NO: 2599 - RNA, 19 nt, synthetic construct
  source 1..19: mol_type = other RNA
gcctgcaatgtctgctgca

SEQ ID NO: 2600 - RNA, 19 nt, synthetic construct
  source 1..19: mol_type = other RNA
ggcctgcaatgtctgctgc

SEQ ID NO: 2601 - RNA, 19 nt, synthetic construct
  source 1..19: mol_type = other RNA
aggcctgcaatgtctgctg

SEQ ID NO: 2602 - RNA, 19 nt, synthetic construct
  source 1..19: mol_type = other RNA
caggcctgcaatgtctgct

SEQ ID NO: 2603 - RNA, 19 nt, synthetic construct
  source 1..19: mol_type = other RNA
tcaggcctgcaatgtctgc

SEQ ID NO: 2604 - RNA, 19 nt, synthetic construct
  source 1..19: mol_type = other RNA
ttcaggcctgcaatgtctg

SEQ ID NO: 2605 - RNA, 19 nt, synthetic construct
  source 1..19: mol_type = other RNA
cttcaggcctgcaatgtct

SEQ ID NO: 2606 - RNA, 19 nt, synthetic construct
  source 1..19: mol_type = other RNA
tcttcaggcctgcaatgtc

SEQ ID NO: 2607 - RNA, 19 nt, synthetic construct
  source 1..19: mol_type = other RNA
ttcttcaggcctgcaatgt

SEQ ID NO: 2608 - RNA, 19 nt, synthetic construct
  source 1..19: mol_type = other RNA
tttcttcaggcctgcaatg

SEQ ID NO: 2609 - RNA, 19 nt, synthetic construct
  source 1..19: mol_type = other RNA
ctttcttcaggcctgcaat

SEQ ID NO: 2610 - RNA, 19 nt, synthetic construct
  source 1..19: mol_type = other RNA
gctttcttcaggcctgcaa

SEQ ID NO: 2611 - RNA, 19 nt, synthetic construct
  source 1..19: mol_type = other RNA
tgctttcttcaggcctgca

SEQ ID NO: 2612 - RNA, 19 nt, synthetic construct
  source 1..19: mol_type = other RNA
gtgctttcttcaggcctgc

SEQ ID NO: 2613 - RNA, 19 nt, synthetic construct
  source 1..19: mol_type = other RNA
ggtgctttcttcaggcctg

SEQ ID NO: 2614 - RNA, 19 nt, synthetic construct
  source 1..19: mol_type = other RNA
aggtgctttcttcaggcct

SEQ ID NO: 2615 - RNA, 19 nt, synthetic construct
  source 1..19: mol_type = other RNA
aaggtgctttcttcaggcc

SEQ ID NO: 2616 - RNA, 19 nt, synthetic construct
  source 1..19: mol_type = other RNA
aaaggtgctttcttcaggc

SEQ ID NO: 2617 - RNA, 19 nt, synthetic construct
  source 1..19: mol_type = other RNA
aaaaggtgctttcttcagg

SEQ ID NO: 2618 - RNA, 19 nt, synthetic construct
  source 1..19: mol_type = other RNA
gaaaaggtgctttcttcag

SEQ ID NO: 2619 - RNA, 19 nt, synthetic construct
  source 1..19: mol_type = other RNA
agaaaaggtgctttcttca

SEQ ID NO: 2620 - RNA, 19 nt, synthetic construct
  source 1..19: mol_type = other RNA
cagaaaaggtgctttcttc

SEQ ID NO: 2621 - RNA, 19 nt, synthetic construct
  source 1..19: mol_type = other RNA
gcagaaaaggtgctttctt

SEQ ID NO: 2622 - RNA, 19 nt, synthetic construct
  source 1..19: mol_type = other RNA
agcagaaaaggtgctttct

SEQ ID NO: 2623 - RNA, 19 nt, synthetic construct
  source 1..19: mol_type = other RNA
cagcagaaaaggtgctttc

SEQ ID NO: 2624 - RNA, 19 nt, synthetic construct
  source 1..19: mol_type = other RNA
gcagcagaaaaggtgcttt

SEQ ID NO: 2625 - RNA, 19 nt, synthetic construct
  source 1..19: mol_type = other RNA
ggcagcagaaaaggtgctt

SEQ ID NO: 2626 - RNA, 19 nt, synthetic construct
  source 1..19: mol_type = other RNA
tggcagcagaaaaggtgct

SEQ ID NO: 2627 - RNA, 19 nt, synthetic construct
  source 1..19: mol_type = other RNA
atggcagcagaaaaggtgc

SEQ ID NO: 2628 - RNA, 19 nt, synthetic construct
  source 1..19: mol_type = other RNA
catggcagcagaaaaggtg

SEQ ID NO: 2629 - RNA, 19 nt, synthetic construct
  source 1..19: mol_type = other RNA
tcatggcagcagaaaaggt

SEQ ID NO: 2630 - RNA, 19 nt, synthetic construct
  source 1..19: mol_type = other RNA
gtcatggcagcagaaaagg

SEQ ID NO: 2631 - RNA, 19 nt, synthetic construct
  source 1..19: mol_type = other RNA
tgtcatggcagcagaaaag

SEQ ID NO: 2632 - RNA, 19 nt, synthetic construct
  source 1..19: mol_type = other RNA
ttgtcatggcagcagaaaa

SEQ ID NO: 2633 - RNA, 19 nt, synthetic construct
  source 1..19: mol_type = other RNA
gttgtcatggcagcagaaa

SEQ ID NO: 2634 - RNA, 19 nt, synthetic construct
  source 1..19: mol_type = other RNA
ggttgtcatggcagcagaa

SEQ ID NO: 2635 - RNA, 19 nt, synthetic construct
  source 1..19: mol_type = other RNA
tggttgtcatggcagcaga

SEQ ID NO: 2636 - RNA, 19 nt, synthetic construct
  source 1..19: mol_type = other RNA
atggttgtcatggcagcag

SEQ ID NO: 2637 - RNA, 19 nt, synthetic construct
  source 1..19: mol_type = other RNA
catggttgtcatggcagca

SEQ ID NO: 2638 - RNA, 19 nt, synthetic construct
  source 1..19: mol_type = other RNA
gcatggttgtcatggcagc

SEQ ID NO: 2639 - RNA, 19 nt, synthetic construct
  source 1..19: mol_type = other RNA
tgcatggttgtcatggcag

SEQ ID NO: 2640 - RNA, 19 nt, synthetic construct
  source 1..19: mol_type = other RNA
ttgcatggttgtcatggca

SEQ ID NO: 2641 - RNA, 19 nt, synthetic construct
  source 1..19: mol_type = other RNA
cttgcatggttgtcatggc

SEQ ID NO: 2642 - RNA, 19 nt, synthetic construct
  source 1..19: mol_type = other RNA
ccttgcatggttgtcatgg

SEQ ID NO: 2643 - RNA, 19 nt, synthetic construct
  source 1..19: mol_type = other RNA
tccttgcatggttgtcatg

SEQ ID NO: 2644 - RNA, 19 nt, synthetic construct
  source 1..19: mol_type = other RNA
ttccttgcatggttgtcat

SEQ ID NO: 2645 - RNA, 19 nt, synthetic construct
  source 1..19: mol_type = other RNA
attccttgcatggttgtca

SEQ ID NO: 2646 - RNA, 19 nt, synthetic construct
  source 1..19: mol_type = other RNA
cattccttgcatggttgtc

SEQ ID NO: 2647 - RNA, 19 nt, synthetic construct
  source 1..19: mol_type = other RNA
ccattccttgcatggttgt

SEQ ID NO: 2648 - RNA, 19 nt, synthetic construct
  source 1..19: mol_type = other RNA
tccattccttgcatggttg

SEQ ID NO: 2649 - RNA, 19 nt, synthetic construct
  source 1..19: mol_type = other RNA
ttccattccttgcatggtt

SEQ ID NO: 2650 - RNA, 19 nt, synthetic construct
  source 1..19: mol_type = other RNA
gttccattccttgcatggt

SEQ ID NO: 2651 - RNA, 19 nt, synthetic construct
  source 1..19: mol_type = other RNA
tgttccattccttgcatgg

SEQ ID NO: 2652 - RNA, 19 nt, synthetic construct
  source 1..19: mol_type = other RNA
ctgttccattccttgcatg

SEQ ID NO: 2653 - RNA, 19 nt, synthetic construct
  source 1..19: mol_type = other RNA
tctgttccattccttgcat

SEQ ID NO: 2654 - RNA, 19 nt, synthetic construct
  source 1..19: mol_type = other RNA
gtctgttccattccttgca

SEQ ID NO: 2655 - RNA, 19 nt, synthetic construct
  source 1..19: mol_type = other RNA
ggtctgttccattccttgc

SEQ ID NO: 2656 - RNA, 19 nt, synthetic construct
  source 1..19: mol_type = other RNA
tggtctgttccattccttg

SEQ ID NO: 2657 - RNA, 19 nt, synthetic construct
  source 1..19: mol_type = other RNA
gtggtctgttccattcctt

SEQ ID NO: 2658 - RNA, 19 nt, synthetic construct
  source 1..19: mol_type = other RNA
agtggtctgttccattcct

SEQ ID NO: 2659 - RNA, 19 nt, synthetic construct
  source 1..19: mol_type = other RNA
gagtggtctgttccattcc

SEQ ID NO: 2660 - RNA, 19 nt, synthetic construct
  source 1..19: mol_type = other RNA
ggagtggtctgttccattc

SEQ ID NO: 2661 - RNA, 19 nt, synthetic construct
  source 1..19: mol_type = other RNA
tggagtggtctgttccatt

SEQ ID NO: 2662 - RNA, 19 nt, synthetic construct
  source 1..19: mol_type = other RNA
ctggagtggtctgttccat

SEQ ID NO: 2663 - RNA, 19 nt, synthetic construct
  source 1..19: mol_type = other RNA
cctggagtggtctgttcca

SEQ ID NO: 2664 - RNA, 19 nt, synthetic construct
  source 1..19: mol_type = other RNA
ccctggagtggtctgttcc

SEQ ID NO: 2665 - RNA, 19 nt, synthetic construct
  source 1..19: mol_type = other RNA
cccctggagtggtctgttc

SEQ ID NO: 2666 - RNA, 19 nt, synthetic construct
  source 1..19: mol_type = other RNA
gcccctggagtggtctgtt

SEQ ID NO: 2667 - RNA, 19 nt, synthetic construct
  source 1..19: mol_type = other RNA
agcccctggagtggtctgt

SEQ ID NO: 2668 - RNA, 19 nt, synthetic construct
  source 1..19: mol_type = other RNA
cagcccctggagtggtctg

SEQ ID NO: 2669 - RNA, 19 nt, synthetic construct
  source 1..19: mol_type = other RNA
ccagcccctggagtggtct

SEQ ID NO: 2670 - RNA, 19 nt, synthetic construct
  source 1..19: mol_type = other RNA
gccagcccctggagtggtc

SEQ ID NO: 2671 - RNA, 19 nt, synthetic construct
  source 1..19: mol_type = other RNA
ggccagcccctggagtggt

SEQ ID NO: 2672 - RNA, 19 nt, synthetic construct
  source 1..19: mol_type = other RNA
gggccagcccctggagtgg

SEQ ID NO: 2673 - RNA, 19 nt, synthetic construct
  source 1..19: mol_type = other RNA
agggccagcccctggagtg

SEQ ID NO: 2674 - RNA, 19 nt, synthetic construct
  source 1..19: mol_type = other RNA
cagggccagcccctggagt

SEQ ID NO: 2675 - RNA, 19 nt, synthetic construct
  source 1..19: mol_type = other RNA
tcagggccagcccctggag

SEQ ID NO: 2676 - RNA, 19 nt, synthetic construct
  source 1..19: mol_type = other RNA
atcagggccagcccctgga

SEQ ID NO: 2677 - RNA, 19 nt, synthetic construct
  source 1..19: mol_type = other RNA
catcagggccagcccctgg

SEQ ID NO: 2678 - RNA, 19 nt, synthetic construct
  source 1..19: mol_type = other RNA
acatcagggccagcccctg

SEQ ID NO: 2679 - RNA, 19 nt, synthetic construct
  source 1..19: mol_type = other RNA
cacatcagggccagcccct

SEQ ID NO: 2680 - RNA, 19 nt, synthetic construct
  source 1..19: mol_type = other RNA
gcacatcagggccagcccc

SEQ ID NO: 2681 - RNA, 19 nt, synthetic construct
  source 1..19: mol_type = other RNA
ggcacatcagggccagccc

SEQ ID NO: 2682 - RNA, 19 nt, synthetic construct
  source 1..19: mol_type = other RNA
gggcacatcagggccagcc

SEQ ID NO: 2683 - RNA, 19 nt, synthetic construct
  source 1..19: mol_type = other RNA
ggggcacatcagggccagc

SEQ ID NO: 2684 - RNA, 19 nt, synthetic construct
  source 1..19: mol_type = other RNA
tggggcacatcagggccag

SEQ ID NO: 2685 - RNA, 19 nt, synthetic construct
  source 1..19: mol_type = other RNA
ctggggcacatcagggcca

SEQ ID NO: 2686 - RNA, 19 nt, synthetic construct
  source 1..19: mol_type = other RNA
gctggggcacatcagggcc

SEQ ID NO: 2687 - RNA, 19 nt, synthetic construct
  source 1..19: mol_type = other RNA
agctggggcacatcagggc

SEQ ID NO: 2688 - RNA, 19 nt, synthetic construct
  source 1..19: mol_type = other RNA
cagctggggcacatcaggg

SEQ ID NO: 2689 - RNA, 19 nt, synthetic construct
  source 1..19: mol_type = other RNA
ccagctggggcacatcagg

SEQ ID NO: 2690 - RNA, 19 nt, synthetic construct
  source 1..19: mol_type = other RNA
cccagctggggcacatcag

SEQ ID NO: 2691 - RNA, 19 nt, synthetic construct
  source 1..19: mol_type = other RNA
tcccagctggggcacatca

SEQ ID NO: 2692 - RNA, 19 nt, synthetic construct
  source 1..19: mol_type = other RNA
ttcccagctggggcacatc

SEQ ID NO: 2693 - RNA, 19 nt, synthetic construct
  source 1..19: mol_type = other RNA
tttcccagctggggcacat

SEQ ID NO: 2694 - RNA, 19 nt, synthetic construct
  source 1..19: mol_type = other RNA
gtttcccagctggggcaca

SEQ ID NO: 2695 - RNA, 19 nt, synthetic construct
  source 1..19: mol_type = other RNA
tgtttcccagctggggcac

SEQ ID NO: 2696 - RNA, 19 nt, synthetic construct
  source 1..19: mol_type = other RNA
atgtttcccagctggggca

SEQ ID NO: 2697 - RNA, 19 nt, synthetic construct
  source 1..19: mol_type = other RNA
tatgtttcccagctggggc

SEQ ID NO: 2698 - RNA, 19 nt, synthetic construct
  source 1..19: mol_type = other RNA
ctatgtttcccagctgggg

SEQ ID NO: 2699 - RNA, 19 nt, synthetic construct
  source 1..19: mol_type = other RNA
tctatgtttcccagctggg

SEQ ID NO: 2700 - RNA, 19 nt, synthetic construct
  source 1..19: mol_type = other RNA
atctatgtttcccagctgg

SEQ ID NO: 2701 - RNA, 19 nt, synthetic construct
  source 1..19: mol_type = other RNA
catctatgtttcccagctg

SEQ ID NO: 2702 - RNA, 19 nt, synthetic construct
  source 1..19: mol_type = other RNA
acatctatgtttcccagct

SEQ ID NO: 2703 - RNA, 19 nt, synthetic construct
  source 1..19: mol_type = other RNA
gacatctatgtttcccagc

SEQ ID NO: 2704 - RNA, 19 nt, synthetic construct
  source 1..19: mol_type = other RNA
tgacatctatgtttcccag

SEQ ID NO: 2705 - RNA, 19 nt, synthetic construct
  source 1..19: mol_type = other RNA
atgacatctatgtttccca

SEQ ID NO: 2706 - RNA, 19 nt, synthetic construct
  source 1..19: mol_type = other RNA
tatgacatctatgtttccc

SEQ ID NO: 2707 - RNA, 19 nt, synthetic construct
  source 1..19: mol_type = other RNA
gtatgacatctatgtttcc

SEQ ID NO: 2708 - RNA, 19 nt, synthetic construct
  source 1..19: mol_type = other RNA
tgtatgacatctatgtttc

SEQ ID NO: 2709 - RNA, 19 nt, synthetic construct
  source 1..19: mol_type = other RNA
atgtatgacatctatgttt

SEQ ID NO: 2710 - RNA, 19 nt, synthetic construct
  source 1..19: mol_type = other RNA
aatgtatgacatctatgtt

SEQ ID NO: 2711 - RNA, 19 nt, synthetic construct
  source 1..19: mol_type = other RNA
gaatgtatgacatctatgt

SEQ ID NO: 2712 - RNA, 19 nt, synthetic construct
  source 1..19: mol_type = other RNA
tgaatgtatgacatctatg

SEQ ID NO: 2713 - RNA, 19 nt, synthetic construct
  source 1..19: mol_type = other RNA
atgaatgtatgacatctat

SEQ ID NO: 2714 - RNA, 19 nt, synthetic construct
  source 1..19: mol_type = other RNA
tatgaatgtatgacatcta

SEQ ID NO: 2715 - RNA, 19 nt, synthetic construct
  source 1..19: mol_type = other RNA
atatgaatgtatgacatct

SEQ ID NO: 2716 - RNA, 19 nt, synthetic construct
  source 1..19: mol_type = other RNA
gatatgaatgtatgacatc

SEQ ID NO: 2717 - RNA, 19 nt, synthetic construct
  source 1..19: mol_type = other RNA
agatatgaatgtatgacat

SEQ ID NO: 2718 - RNA, 19 nt, synthetic construct
  source 1..19: mol_type = other RNA
cagatatgaatgtatgaca

SEQ ID NO: 2719 - RNA, 19 nt, synthetic construct
  source 1..19: mol_type = other RNA
acagatatgaatgtatgac

SEQ ID NO: 2720 - RNA, 19 nt, synthetic construct
  source 1..19: mol_type = other RNA
cacagatatgaatgtatga

SEQ ID NO: 2721 - RNA, 19 nt, synthetic construct
  source 1..19: mol_type = other RNA
acacagatatgaatgtatg

SEQ ID NO: 2722 - RNA, 19 nt, synthetic construct
  source 1..19: mol_type = other RNA
tacacagatatgaatgtat

SEQ ID NO: 2723 - RNA, 19 nt, synthetic construct
  source 1..19: mol_type = other RNA
ttacacagatatgaatgta

SEQ ID NO: 2724 - RNA, 19 nt, synthetic construct
  source 1..19: mol_type = other RNA
tttacacagatatgaatgt

SEQ ID NO: 2725 - RNA, 19 nt, synthetic construct
  source 1..19: mol_type = other RNA
ctttacacagatatgaatg

SEQ ID NO: 2726 - RNA, 19 nt, synthetic construct
  source 1..19: mol_type = other RNA
cctttacacagatatgaat

SEQ ID NO: 2727 - RNA, 19 nt, synthetic construct
  source 1..19: mol_type = other RNA
tcctttacacagatatgaa

SEQ ID NO: 2728 - RNA, 19 nt, synthetic construct
  source 1..19: mol_type = other RNA
atcctttacacagatatga

SEQ ID NO: 2729 - RNA, 19 nt, synthetic construct
  source 1..19: mol_type = other RNA
aatcctttacacagatatg

SEQ ID NO: 2730 - RNA, 19 nt, synthetic construct
  source 1..19: mol_type = other RNA
caatcctttacacagatat

SEQ ID NO: 2731 - RNA, 19 nt, synthetic construct
  source 1..19: mol_type = other RNA
gcaatcctttacacagata

SEQ ID NO: 2732 - RNA, 19 nt, synthetic construct
  source 1..19: mol_type = other RNA
tgcaatcctttacacagat

SEQ ID NO: 2733 - RNA, 19 nt, synthetic construct
  source 1..19: mol_type = other RNA
ttgcaatcctttacacaga

SEQ ID NO: 2734 - RNA, 19 nt, synthetic construct
  source 1..19: mol_type = other RNA
cttgcaatcctttacacag

SEQ ID NO: 2735 - RNA, 19 nt, synthetic construct
  source 1..19: mol_type = other RNA
tcttgcaatcctttacaca

SEQ ID NO: 2736 - RNA, 19 nt, synthetic construct
  source 1..19: mol_type = other RNA
ctcttgcaatcctttacac

SEQ ID NO: 2737 - RNA, 19 nt, synthetic construct
  source 1..19: mol_type = other RNA
tctcttgcaatcctttaca

SEQ ID NO: 2738 - RNA, 19 nt, synthetic construct
  source 1..19: mol_type = other RNA
ttctcttgcaatcctttac

SEQ ID NO: 2739 - RNA, 19 nt, synthetic construct
  source 1..19: mol_type = other RNA
cttctcttgcaatccttta

SEQ ID NO: 2740 - RNA, 19 nt, synthetic construct
  source 1..19: mol_type = other RNA
acttctcttgcaatccttt

SEQ ID NO: 2741 - RNA, 19 nt, synthetic construct
  source 1..19: mol_type = other RNA
aacttctcttgcaatcctt

SEQ ID NO: 2742 - RNA, 19 nt, synthetic construct
  source 1..19: mol_type = other RNA
gaacttctcttgcaatcct

SEQ ID NO: 2743 - RNA, 19 nt, synthetic construct
  source 1..19: mol_type = other RNA
agaacttctcttgcaatcc

SEQ ID NO: 2744 - RNA, 19 nt, synthetic construct
  source 1..19: mol_type = other RNA
aagaacttctcttgcaatc

SEQ ID NO: 2745 - RNA, 19 nt, synthetic construct
  source 1..19: mol_type = other RNA
gaagaacttctcttgcaat

SEQ ID NO: 2746 - RNA, 19 nt, synthetic construct
  source 1..19: mol_type = other RNA
tgaagaacttctcttgcaa

SEQ ID NO: 2747 - RNA, 19 nt, synthetic construct
  source 1..19: mol_type = other RNA
ttgaagaacttctcttgca

SEQ ID NO: 2748 - RNA, 19 nt, synthetic construct
  source 1..19: mol_type = other RNA
cttgaagaacttctcttgc

SEQ ID NO: 2749 - RNA, 19 nt, synthetic construct
  source 1..19: mol_type = other RNA
tcttgaagaacttctcttg

SEQ ID NO: 2750 - RNA, 19 nt, synthetic construct
  source 1..19: mol_type = other RNA
ctcttgaagaacttctctt

SEQ ID NO: 2751 - RNA, 19 nt, synthetic construct
  source 1..19: mol_type = other RNA
cctcttgaagaacttctct

SEQ ID NO: 2752 - RNA, 19 nt, synthetic construct
  source 1..19: mol_type = other RNA
tcctcttgaagaacttctc

SEQ ID NO: 2753 - RNA, 19 nt, synthetic construct
  source 1..19: mol_type = other RNA
ttcctcttgaagaacttct

SEQ ID NO: 2754 - RNA, 19 nt, synthetic construct
  source 1..19: mol_type = other RNA
tttcctcttgaagaacttc

SEQ ID NO: 2755 - RNA, 19 nt, synthetic construct
  source 1..19: mol_type = other RNA
gtttcctcttgaagaactt

SEQ ID NO: 2756 - RNA, 19 nt, synthetic construct
  source 1..19: mol_type = other RNA
ggtttcctcttgaagaact

SEQ ID NO: 2757 - RNA, 19 nt, synthetic construct
  source 1..19: mol_type = other RNA
gggtttcctcttgaagaac

SEQ ID NO: 2758 - RNA, 19 nt, synthetic construct
  source 1..19: mol_type = other RNA
tgggtttcctcttgaagaa

SEQ ID NO: 2759 - RNA, 19 nt, synthetic construct
  source 1..19: mol_type = other RNA
ttgggtttcctcttgaaga

SEQ ID NO: 2760 - RNA, 19 nt, synthetic construct
  source 1..19: mol_type = other RNA
tttgggtttcctcttgaag

SEQ ID NO: 2761 - RNA, 19 nt, synthetic construct
  source 1..19: mol_type = other RNA
ctttgggtttcctcttgaa

SEQ ID NO: 2762 - RNA, 19 nt, synthetic construct
  source 1..19: mol_type = other RNA
actttgggtttcctcttga

SEQ ID NO: 2763 - RNA, 19 nt, synthetic construct
  source 1..19: mol_type = other RNA
gactttgggtttcctcttg

SEQ ID NO: 2764 - RNA, 19 nt, synthetic construct
  source 1..19: mol_type = other RNA
ggactttgggtttcctctt

SEQ ID NO: 2765 - RNA, 19 nt, synthetic construct
  source 1..19: mol_type = other RNA
aggactttgggtttcctct

SEQ ID NO: 2766 - RNA, 19 nt, synthetic construct
  source 1..19: mol_type = other RNA
aaggactttgggtttcctc

SEQ ID NO: 2767 - RNA, 19 nt, synthetic construct
  source 1..19: mol_type = other RNA
caaggactttgggtttcct

SEQ ID NO: 2768 - RNA, 19 nt, synthetic construct
  source 1..19: mol_type = other RNA
ccaaggactttgggtttcc

SEQ ID NO: 2769 - RNA, 19 nt, synthetic construct
  source 1..19: mol_type = other RNA
cccaaggactttgggtttc

SEQ ID NO: 2770 - RNA, 19 nt, synthetic construct
  source 1..19: mol_type = other RNA
ccccaaggactttgggttt

SEQ ID NO: 2771 - RNA, 19 nt, synthetic construct
  source 1..19: mol_type = other RNA
accccaaggactttgggtt

SEQ ID NO: 2772 - RNA, 19 nt, synthetic construct
  source 1..19: mol_type = other RNA
aaccccaaggactttgggt

SEQ ID NO: 2773 - RNA, 19 nt, synthetic construct
  source 1..19: mol_type = other RNA
aaaccccaaggactttggg

SEQ ID NO: 2774 - RNA, 19 nt, synthetic construct
  source 1..19: mol_type = other RNA
aaaaccccaaggactttgg

SEQ ID NO: 2775 - RNA, 19 nt, synthetic construct
  source 1..19: mol_type = other RNA
caaaaccccaaggactttg

SEQ ID NO: 2776 - RNA, 19 nt, synthetic construct
  source 1..19: mol_type = other RNA
acaaaaccccaaggacttt

SEQ ID NO: 2777 - RNA, 19 nt, synthetic construct
  source 1..19: mol_type = other RNA
cacaaaaccccaaggactt

SEQ ID NO: 2778 - RNA, 19 nt, synthetic construct
  source 1..19: mol_type = other RNA
acacaaaaccccaaggact

SEQ ID NO: 2779 - RNA, 19 nt, synthetic construct
  source 1..19: mol_type = other RNA
cacacaaaaccccaaggac

SEQ ID NO: 2780 - RNA, 19 nt, synthetic construct
  source 1..19: mol_type = other RNA
ccacacaaaaccccaagga

SEQ ID NO: 2781 - RNA, 19 nt, synthetic construct
  source 1..19: mol_type = other RNA
tccacacaaaaccccaagg

SEQ ID NO: 2782 - RNA, 19 nt, synthetic construct
  source 1..19: mol_type = other RNA
gtccacacaaaaccccaag

SEQ ID NO: 2783 - RNA, 19 nt, synthetic construct
  source 1..19: mol_type = other RNA
tgtccacacaaaaccccaa

SEQ ID NO: 2784 - RNA, 19 nt, synthetic construct
  source 1..19: mol_type = other RNA
atgtccacacaaaacccca

SEQ ID NO: 2785 - RNA, 19 nt, synthetic construct
  source 1..19: mol_type = other RNA
tatgtccacacaaaacccc

SEQ ID NO: 2786 - RNA, 19 nt, synthetic construct
  source 1..19: mol_type = other RNA
ttatgtccacacaaaaccc

SEQ ID NO: 2787 - RNA, 19 nt, synthetic construct
  source 1..19: mol_type = other RNA
cttatgtccacacaaaacc

SEQ ID NO: 2788 - RNA, 19 nt, synthetic construct
  source 1..19: mol_type = other RNA
acttatgtccacacaaaac

SEQ ID NO: 2789 - RNA, 19 nt, synthetic construct
  source 1..19: mol_type = other RNA
aacttatgtccacacaaaa

SEQ ID NO: 2790 - RNA, 19 nt, synthetic construct
  source 1..19: mol_type = other RNA
aaacttatgtccacacaaa

SEQ ID NO: 2791 - RNA, 19 nt, synthetic construct
  source 1..19: mol_type = other RNA
aaaacttatgtccacacaa

SEQ ID NO: 2792 - RNA, 19 nt, synthetic construct
  source 1..19: mol_type = other RNA
gaaaacttatgtccacaca

SEQ ID NO: 2793 - RNA, 19 nt, synthetic construct
  source 1..19: mol_type = other RNA
tgaaaacttatgtccacac

SEQ ID NO: 2794 - RNA, 19 nt, synthetic construct
  source 1..19: mol_type = other RNA
ttgaaaacttatgtccaca

SEQ ID NO: 2795 - RNA, 19 nt, synthetic construct
  source 1..19: mol_type = other RNA
gttgaaaacttatgtccac

SEQ ID NO: 2796 - RNA, 19 nt, synthetic construct
  source 1..19: mol_type = other RNA
agttgaaaacttatgtcca

SEQ ID NO: 2797 - RNA, 19 nt, synthetic construct
  source 1..19: mol_type = other RNA
gagttgaaaacttatgtcc

SEQ ID NO: 2798 - RNA, 19 nt, synthetic construct
  source 1..19: mol_type = other RNA
tgagttgaaaacttatgtc

SEQ ID NO: 2799 - RNA, 19 nt, synthetic construct
  source 1..19: mol_type = other RNA
atgagttgaaaacttatgt

SEQ ID NO: 2800 - RNA, 19 nt, synthetic construct
  source 1..19: mol_type = other RNA
aatgagttgaaaacttatg

SEQ ID NO: 2801 - RNA, 19 nt, synthetic construct
  source 1..19: mol_type = other RNA
gaatgagttgaaaacttat

SEQ ID NO: 2802 - RNA, 19 nt, synthetic construct
  source 1..19: mol_type = other RNA
cgaatgagttgaaaactta

SEQ ID NO: 2803 - RNA, 19 nt, synthetic construct
  source 1..19: mol_type = other RNA
ccgaatgagttgaaaactt

SEQ ID NO: 2804 - RNA, 19 nt, synthetic construct
  source 1..19: mol_type = other RNA
accgaatgagttgaaaact

SEQ ID NO: 2805 - RNA, 19 nt, synthetic construct
  source 1..19: mol_type = other RNA
taccgaatgagttgaaaac

SEQ ID NO: 2806 - RNA, 19 nt, synthetic construct
  source 1..19: mol_type = other RNA
ataccgaatgagttgaaaa

SEQ ID NO: 2807 - RNA, 19 nt, synthetic construct
  source 1..19: mol_type = other RNA
gataccgaatgagttgaaa

SEQ ID NO: 2808 - RNA, 19 nt, synthetic construct
  source 1..19: mol_type = other RNA
ggataccgaatgagttgaa

SEQ ID NO: 2809 - RNA, 19 nt, synthetic construct
  source 1..19: mol_type = other RNA
aggataccgaatgagttga

SEQ ID NO: 2810 - RNA, 19 nt, synthetic construct
  source 1..19: mol_type = other RNA
aaggataccgaatgagttg

SEQ ID NO: 2811 - RNA, 19 nt, synthetic construct
  source 1..19: mol_type = other RNA
taaggataccgaatgagtt

SEQ ID NO: 2812 - RNA, 19 nt, synthetic construct
  source 1..19: mol_type = other RNA
ataaggataccgaatgagt

SEQ ID NO: 2813 - RNA, 19 nt, synthetic construct
  source 1..19: mol_type = other RNA
gataaggataccgaatgag

SEQ ID NO: 2814 - RNA, 19 nt, synthetic construct
  source 1..19: mol_type = other RNA
tgataaggataccgaatga

SEQ ID NO: 2815 - RNA, 19 nt, synthetic construct
  source 1..19: mol_type = other RNA
ctgataaggataccgaatg

SEQ ID NO: 2816 - RNA, 19 nt, synthetic construct
  source 1..19: mol_type = other RNA
actgataaggataccgaat

SEQ ID NO: 2817 - RNA, 19 nt, synthetic construct
  source 1..19: mol_type = other RNA
aactgataaggataccgaa

SEQ ID NO: 2818 - RNA, 19 nt, synthetic construct
  source 1..19: mol_type = other RNA
caactgataaggataccga

SEQ ID NO: 2819 - RNA, 19 nt, synthetic construct
  source 1..19: mol_type = other RNA
gcaactgataaggataccg

SEQ ID NO: 2820 - RNA, 19 nt, synthetic construct
  source 1..19: mol_type = other RNA
tgcaactgataaggatacc

SEQ ID NO: 2821 - RNA, 19 nt, synthetic construct
  source 1..19: mol_type = other RNA
ctgcaactgataaggatac

SEQ ID NO: 2822 - RNA, 19 nt, synthetic construct
  source 1..19: mol_type = other RNA
gctgcaactgataaggata

SEQ ID NO: 2823 - RNA, 19 nt, synthetic construct
  source 1..19: mol_type = other RNA
tgctgcaactgataaggat

SEQ ID NO: 2824 - RNA, 19 nt, synthetic construct
  source 1..19: mol_type = other RNA
ctgctgcaactgataagga

SEQ ID NO: 2825 - RNA, 19 nt, synthetic construct
  source 1..19: mol_type = other RNA
cctgctgcaactgataagg

SEQ ID NO: 2826 - RNA, 19 nt, synthetic construct
  source 1..19: mol_type = other RNA
tcctgctgcaactgataag

SEQ ID NO: 2827 - RNA, 19 nt, synthetic construct
  source 1..19: mol_type = other RNA
ttcctgctgcaactgataa

SEQ ID NO: 2828 - RNA, 19 nt, synthetic construct
  source 1..19: mol_type = other RNA
attcctgctgcaactgata

SEQ ID NO: 2829 - RNA, 19 nt, synthetic construct
  source 1..19: mol_type = other RNA
aattcctgctgcaactgat

SEQ ID NO: 2830 - RNA, 19 nt, synthetic construct
  source 1..19: mol_type = other RNA
taattcctgctgcaactga

SEQ ID NO: 2831 - RNA, 19 nt, synthetic construct
  source 1..19: mol_type = other RNA
ctaattcctgctgcaactg

SEQ ID NO: 2832 - RNA, 19 nt, synthetic construct
  source 1..19: mol_type = other RNA
tctaattcctgctgcaact

SEQ ID NO: 2833 - RNA, 19 nt, synthetic construct
  source 1..19: mol_type = other RNA
ttctaattcctgctgcaac

SEQ ID NO: 2834 - RNA, 19 nt, synthetic construct
  source 1..19: mol_type = other RNA
gttctaattcctgctgcaa

SEQ ID NO: 2835 - RNA, 19 nt, synthetic construct
  source 1..19: mol_type = other RNA
tgttctaattcctgctgca

SEQ ID NO: 2836 - RNA, 19 nt, synthetic construct
  source 1..19: mol_type = other RNA
ttgttctaattcctgctgc

SEQ ID NO: 2837 - RNA, 19 nt, synthetic construct
  source 1..19: mol_type = other RNA
gttgttctaattcctgctg

SEQ ID NO: 2838 - RNA, 19 nt, synthetic construct
  source 1..19: mol_type = other RNA
tgttgttctaattcctgct

SEQ ID NO: 2839 - RNA, 19 nt, synthetic construct
  source 1..19: mol_type = other RNA
ttgttgttctaattcctgc

SEQ ID NO: 2840 - RNA, 19 nt, synthetic construct
  source 1..19: mol_type = other RNA
tttgttgttctaattcctg

SEQ ID NO: 2841 - RNA, 19 nt, synthetic construct
  source 1..19: mol_type = other RNA
ttttgttgttctaattcct

SEQ ID NO: 2842 - RNA, 19 nt, synthetic construct
  source 1..19: mol_type = other RNA
cttttgttgttctaattcc

SEQ ID NO: 2843 - RNA, 19 nt, synthetic construct
  source 1..19: mol_type = other RNA
ccttttgttgttctaattc

SEQ ID NO: 2844 - RNA, 19 nt, synthetic construct
  source 1..19: mol_type = other RNA
accttttgttgttctaatt

SEQ ID NO: 2845 - RNA, 19 nt, synthetic construct
  source 1..19: mol_type = other RNA
gaccttttgttgttctaat

SEQ ID NO: 2846 - RNA, 19 nt, synthetic construct
  source 1..19: mol_type = other RNA
agaccttttgttgttctaa

SEQ ID NO: 2847 - RNA, 19 nt, synthetic construct
  source 1..19: mol_type = other RNA
cagaccttttgttgttcta

SEQ ID NO: 2848 - RNA, 19 nt, synthetic construct
  source 1..19: mol_type = other RNA
ccagaccttttgttgttct

SEQ ID NO: 2849 - RNA, 19 nt, synthetic construct
  source 1..19: mol_type = other RNA
accagaccttttgttgttc

SEQ ID NO: 2850 - RNA, 19 nt, synthetic construct
  source 1..19: mol_type = other RNA
aaccagaccttttgttgtt

SEQ ID NO: 2851 - RNA, 19 nt, synthetic construct
  source 1..19: mol_type = other RNA
caaccagaccttttgttgt

SEQ ID NO: 2852 - RNA, 19 nt, synthetic construct
  source 1..19: mol_type = other RNA
ccaaccagaccttttgttg

SEQ ID NO: 2853 - RNA, 19 nt, synthetic construct
  source 1..19: mol_type = other RNA
tccaaccagaccttttgtt

SEQ ID NO: 2854 - RNA, 19 nt, synthetic construct
  source 1..19: mol_type = other RNA
ctccaaccagaccttttgt

SEQ ID NO: 2855 - RNA, 19 nt, synthetic construct
  source 1..19: mol_type = other RNA
cctccaaccagaccttttg

SEQ ID NO: 2856 - RNA, 19 nt, synthetic construct
  source 1..19: mol_type = other RNA
acctccaaccagacctttt

SEQ ID NO: 2857 - RNA, 19 nt, synthetic construct
  source 1..19: mol_type = other RNA
tacctccaaccagaccttt

SEQ ID NO: 2858 - RNA, 19 nt, synthetic construct
  source 1..19: mol_type = other RNA
ctacctccaaccagacctt

SEQ ID NO: 2859 - RNA, 19 nt, synthetic construct
  source 1..19: mol_type = other RNA
actacctccaaccagacct

SEQ ID NO: 2860 - RNA, 19 nt, synthetic construct
  source 1..19: mol_type = other RNA
gactacctccaaccagacc

SEQ ID NO: 2861 - RNA, 19 nt, synthetic construct
  source 1..19: mol_type = other RNA
agactacctccaaccagac

SEQ ID NO: 2862 - RNA, 19 nt, synthetic construct
  source 1..19: mol_type = other RNA
tagactacctccaaccaga

SEQ ID NO: 2863 - RNA, 19 nt, synthetic construct
  source 1..19: mol_type = other RNA
ctagactacctccaaccag

SEQ ID NO: 2864 - RNA, 19 nt, synthetic construct
  source 1..19: mol_type = other RNA
cctagactacctccaacca

SEQ ID NO: 2865 - RNA, 19 nt, synthetic construct
  source 1..19: mol_type = other RNA
tcctagactacctccaacc

SEQ ID NO: 2866 - RNA, 19 nt, synthetic construct
  source 1..19: mol_type = other RNA
ttcctagactacctccaac

SEQ ID NO: 2867 - RNA, 19 nt, synthetic construct
  source 1..19: mol_type = other RNA
tttcctagactacctccaa

SEQ ID NO: 2868 - RNA, 19 nt, synthetic construct
  source 1..19: mol_type = other RNA
ctttcctagactacctcca

SEQ ID NO: 2869 - RNA, 19 nt, synthetic construct
  source 1..19: mol_type = other RNA
tctttcctagactacctcc

SEQ ID NO: 2870 - RNA, 19 nt, synthetic construct
  source 1..19: mol_type = other RNA
ttctttcctagactacctc

SEQ ID NO: 2871 - RNA, 19 nt, synthetic construct
  source 1..19: mol_type = other RNA
attctttcctagactacct

SEQ ID NO: 2872 - RNA, 19 nt, synthetic construct
  source 1..19: mol_type = other RNA
tattctttcctagactacc

SEQ ID NO: 2873 - RNA, 19 nt, synthetic construct
  source 1..19: mol_type = other RNA
atattctttcctagactac

SEQ ID NO: 2874 - RNA, 19 nt, synthetic construct
  source 1..19: mol_type = other RNA
gatattctttcctagacta

SEQ ID NO: 2875 - RNA, 19 nt, synthetic construct
  source 1..19: mol_type = other RNA
tgatattctttcctagact

SEQ ID NO: 2876 - RNA, 19 nt, synthetic construct
  source 1..19: mol_type = other RNA
gtgatattctttcctagac

SEQ ID NO: 2877 - RNA, 19 nt, synthetic construct
  source 1..19: mol_type = other RNA
ggtgatattctttcctaga

SEQ ID NO: 2878 - RNA, 19 nt, synthetic construct
  source 1..19: mol_type = other RNA
tggtgatattctttcctag

SEQ ID NO: 2879 - RNA, 19 nt, synthetic construct
  source 1..19: mol_type = other RNA
ctggtgatattctttccta

SEQ ID NO: 2880 - RNA, 19 nt, synthetic construct
  source 1..19: mol_type = other RNA
actggtgatattctttcct

SEQ ID NO: 2881 - RNA, 19 nt, synthetic construct
  source 1..19: mol_type = other RNA
aactggtgatattctttcc

SEQ ID NO: 2882 - RNA, 19 nt, synthetic construct
  source 1..19: mol_type = other RNA
gaactggtgatattctttc

SEQ ID NO: 2883 - RNA, 19 nt, synthetic construct
  source 1..19: mol_type = other RNA
tgaactggtgatattcttt

SEQ ID NO: 2884 - RNA, 19 nt, synthetic construct
  source 1..19: mol_type = other RNA
ctgaactggtgatattctt

SEQ ID NO: 2885 - RNA, 19 nt, synthetic construct
  source 1..19: mol_type = other RNA
actgaactggtgatattct

SEQ ID NO: 2886 - RNA, 19 nt, synthetic construct
  source 1..19: mol_type = other RNA
gactgaactggtgatattc

SEQ ID NO: 2887 - RNA, 19 nt, synthetic construct
  source 1..19: mol_type = other RNA
agactgaactggtgatatt

SEQ ID NO: 2888 - RNA, 19 nt, synthetic construct
  source 1..19: mol_type = other RNA
aagactgaactggtgatat

SEQ ID NO: 2889 - RNA, 19 nt, synthetic construct
  source 1..19: mol_type = other RNA
caagactgaactggtgata

SEQ ID NO: 2890 - RNA, 19 nt, synthetic construct
  source 1..19: mol_type = other RNA
ccaagactgaactggtgat

SEQ ID NO: 2891 - RNA, 19 nt, synthetic construct
  source 1..19: mol_type = other RNA
gccaagactgaactggtga

SEQ ID NO: 2892 - RNA, 19 nt, synthetic construct
  source 1..19: mol_type = other RNA
agccaagactgaactggtg

SEQ ID NO: 2893 - RNA, 19 nt, synthetic construct
  source 1..19: mol_type = other RNA
tagccaagactgaactggt

SEQ ID NO: 2894 - RNA, 19 nt, synthetic construct
  source 1..19: mol_type = other RNA
atagccaagactgaactgg

SEQ ID NO: 2895 - RNA, 19 nt, synthetic construct
  source 1..19: mol_type = other RNA
tatagccaagactgaactg

SEQ ID NO: 2896 - RNA, 19 nt, synthetic construct
  source 1..19: mol_type = other RNA
atatagccaagactgaact

SEQ ID NO: 2897 - RNA, 19 nt, synthetic construct
  source 1..19: mol_type = other RNA
gatatagccaagactgaac

SEQ ID NO: 2898 - RNA, 19 nt, synthetic construct
  source 1..19: mol_type = other RNA
tgatatagccaagactgaa

SEQ ID NO: 2899 - RNA, 19 nt, synthetic construct
  source 1..19: mol_type = other RNA
ctgatatagccaagactga

SEQ ID NO: 2900 - RNA, 19 nt, synthetic construct
  source 1..19: mol_type = other RNA
cctgatatagccaagactg

SEQ ID NO: 2901 - RNA, 19 nt, synthetic construct
  source 1..19: mol_type = other RNA
ccctgatatagccaagact

SEQ ID NO: 2902 - RNA, 19 nt, synthetic construct
  source 1..19: mol_type = other RNA
tccctgatatagccaagac

SEQ ID NO: 2903 - RNA, 19 nt, synthetic construct
  source 1..19: mol_type = other RNA
atccctgatatagccaaga

SEQ ID NO: 2904 - RNA, 19 nt, synthetic construct
  source 1..19: mol_type = other RNA
gatccctgatatagccaag

SEQ ID NO: 2905 - RNA, 19 nt, synthetic construct
  source 1..19: mol_type = other RNA
agatccctgatatagccaa

SEQ ID NO: 2906 - RNA, 19 nt, synthetic construct
  source 1..19: mol_type = other RNA
aagatccctgatatagcca

SEQ ID NO: 2907 - RNA, 19 nt, synthetic construct
  source 1..19: mol_type = other RNA
taagatccctgatatagcc

SEQ ID NO: 2908 - RNA, 19 nt, synthetic construct
  source 1..19: mol_type = other RNA
ttaagatccctgatatagc

SEQ ID NO: 2909 - RNA, 19 nt, synthetic construct
  source 1..19: mol_type = other RNA
attaagatccctgatatag

SEQ ID NO: 2910 - RNA, 19 nt, synthetic construct
  source 1..19: mol_type = other RNA
gattaagatccctgatata

SEQ ID NO: 2911 - RNA, 19 nt, synthetic construct
  source 1..19: mol_type = other RNA
tgattaagatccctgatat

SEQ ID NO: 2912 - RNA, 19 nt, synthetic construct
  source 1..19: mol_type = other RNA
ttgattaagatccctgata

SEQ ID NO: 2913 - RNA, 19 nt, synthetic construct
  source 1..19: mol_type = other RNA
attgattaagatccctgat

SEQ ID NO: 2914 - RNA, 19 nt, synthetic construct
  source 1..19: mol_type = other RNA
cattgattaagatccctga

SEQ ID NO: 2915 - RNA, 19 nt, synthetic construct
  source 1..19: mol_type = other RNA
gcattgattaagatccctg

SEQ ID NO: 2916 - RNA, 19 nt, synthetic construct
  source 1..19: mol_type = other RNA
tgcattgattaagatccct

SEQ ID NO: 2917 - RNA, 19 nt, synthetic construct
  source 1..19: mol_type = other RNA
ttgcattgattaagatccc

SEQ ID NO: 2918 - RNA, 19 nt, synthetic construct
  source 1..19: mol_type = other RNA
attgcattgattaagatcc

SEQ ID NO: 2919 - RNA, 19 nt, synthetic construct
  source 1..19: mol_type = other RNA
tattgcattgattaagatc

SEQ ID NO: 2920 - RNA, 19 nt, synthetic construct
  source 1..19: mol_type = other RNA
ttattgcattgattaagat

SEQ ID NO: 2921 - RNA, 19 nt, synthetic construct
  source 1..19: mol_type = other RNA
cttattgcattgattaaga

SEQ ID NO: 2922 - RNA, 19 nt, synthetic construct
  source 1..19: mol_type = other RNA
gcttattgcattgattaag

SEQ ID NO: 2923 - RNA, 19 nt, synthetic construct
  source 1..19: mol_type = other RNA
agcttattgcattgattaa

SEQ ID NO: 2924 - RNA, 19 nt, synthetic construct
  source 1..19: mol_type = other RNA
aagcttattgcattgatta

SEQ ID NO: 2925 - RNA, 19 nt, synthetic construct
  source 1..19: mol_type = other RNA
caagcttattgcattgatt

SEQ ID NO: 2926 - RNA, 19 nt, synthetic construct
  source 1..19: mol_type = other RNA
tcaagcttattgcattgat

SEQ ID NO: 2927 - RNA, 19 nt, synthetic construct
  source 1..19: mol_type = other RNA
gtcaagcttattgcattga

SEQ ID NO: 2928 - RNA, 19 nt, synthetic construct
  source 1..19: mol_type = other RNA
cgtcaagcttattgcattg

SEQ ID NO: 2929 - RNA, 19 nt, synthetic construct
  source 1..19: mol_type = other RNA
acgtcaagcttattgcatt

SEQ ID NO: 2930 - RNA, 19 nt, synthetic construct
  source 1..19: mol_type = other RNA
aacgtcaagcttattgcat

SEQ ID NO: 2931 - RNA, 19 nt, synthetic construct
  source 1..19: mol_type = other RNA
aaacgtcaagcttattgca

SEQ ID NO: 2932 - RNA, 19 nt, synthetic construct
  source 1..19: mol_type = other RNA
aaaacgtcaagcttattgc

SEQ ID NO: 2933 - RNA, 19 nt, synthetic construct
  source 1..19: mol_type = other RNA
taaaacgtcaagcttattg

SEQ ID NO: 2934 - RNA, 19 nt, synthetic construct
  source 1..19: mol_type = other RNA
ataaaacgtcaagcttatt

SEQ ID NO: 2935 - RNA, 19 nt, synthetic construct
  source 1..19: mol_type = other RNA
aataaaacgtcaagcttat

SEQ ID NO: 2936 - RNA, 19 nt, synthetic construct
  source 1..19: mol_type = other RNA
gaataaaacgtcaagctta

SEQ ID NO: 2937 - RNA, 19 nt, synthetic construct
  source 1..19: mol_type = other RNA
tgaataaaacgtcaagctt

SEQ ID NO: 2938 - RNA, 19 nt, synthetic construct
  source 1..19: mol_type = other RNA
atgaataaaacgtcaagct

SEQ ID NO: 2939 - RNA, 19 nt, synthetic construct
  source 1..19: mol_type = other RNA
aatgaataaaacgtcaagc

SEQ ID NO: 2940 - RNA, 19 nt, synthetic construct
  source 1..19: mol_type = other RNA
gaatgaataaaacgtcaag

SEQ ID NO: 2941 - RNA, 19 nt, synthetic construct
  source 1..19: mol_type = other RNA
ggaatgaataaaacgtcaa

SEQ ID NO: 2942 - RNA, 19 nt, synthetic construct
  source 1..19: mol_type = other RNA
cggaatgaataaaacgtca

SEQ ID NO: 2943 - RNA, 19 nt, synthetic construct
  source 1..19: mol_type = other RNA
acggaatgaataaaacgtc

SEQ ID NO: 2944 - RNA, 19 nt, synthetic construct
  source 1..19: mol_type = other RNA
aacggaatgaataaaacgt

SEQ ID NO: 2945 - RNA, 19 nt, synthetic construct
  source 1..19: mol_type = other RNA
taacggaatgaataaaacg

SEQ ID NO: 2946 - RNA, 19 nt, synthetic construct
  source 1..19: mol_type = other RNA
gtaacggaatgaataaaac

SEQ ID NO: 2947 - RNA, 19 nt, synthetic construct
  source 1..19: mol_type = other RNA
ggtaacggaatgaataaaa

SEQ ID NO: 2948 - RNA, 19 nt, synthetic construct
  source 1..19: mol_type = other RNA
tggtaacggaatgaataaa

SEQ ID NO: 2949 - RNA, 19 nt, synthetic construct
  source 1..19: mol_type = other RNA
atggtaacggaatgaataa

SEQ ID NO: 2950 - RNA, 19 nt, synthetic construct
  source 1..19: mol_type = other RNA
aatggtaacggaatgaata

SEQ ID NO: 2951 - RNA, 19 nt, synthetic construct
  source 1..19: mol_type = other RNA
taatggtaacggaatgaat

SEQ ID NO: 2952 - RNA, 19 nt, synthetic construct
  source 1..19: mol_type = other RNA
gtaatggtaacggaatgaa

SEQ ID NO: 2953 - RNA, 19 nt, synthetic construct
  source 1..19: mol_type = other RNA
agtaatggtaacggaatga

SEQ ID NO: 2954 - RNA, 19 nt, synthetic construct
  source 1..19: mol_type = other RNA
cagtaatggtaacggaatg

SEQ ID NO: 2955 - RNA, 19 nt, synthetic construct
  source 1..19: mol_type = other RNA
acagtaatggtaacggaat

SEQ ID NO: 2956 - RNA, 19 nt, synthetic construct
  source 1..19: mol_type = other RNA
tacagtaatggtaacggaa

SEQ ID NO: 2957 - RNA, 19 nt, synthetic construct
  source 1..19: mol_type = other RNA
ttacagtaatggtaacgga

SEQ ID NO: 2958 - RNA, 19 nt, synthetic construct
  source 1..19: mol_type = other RNA
gttacagtaatggtaacgg

SEQ ID NO: 2959 - RNA, 19 nt, synthetic construct
  source 1..19: mol_type = other RNA
ggttacagtaatggtaacg

SEQ ID NO: 2960 - RNA, 19 nt, synthetic construct
  source 1..19: mol_type = other RNA
tggttacagtaatggtaac

SEQ ID NO: 2961 - RNA, 19 nt, synthetic construct
  source 1..19: mol_type = other RNA
gtggttacagtaatggtaa

SEQ ID NO: 2962 - RNA, 19 nt, synthetic construct
  source 1..19: mol_type = other RNA
cgtggttacagtaatggta

SEQ ID NO: 2963 - RNA, 19 nt, synthetic construct
  source 1..19: mol_type = other RNA
tcgtggttacagtaatggt

SEQ ID NO: 2964 - RNA, 19 nt, synthetic construct
  source 1..19: mol_type = other RNA
atcgtggttacagtaatgg

SEQ ID NO: 2965 - RNA, 19 nt, synthetic construct
  source 1..19: mol_type = other RNA
gatcgtggttacagtaatg

SEQ ID NO: 2966 - RNA, 19 nt, synthetic construct
  source 1..19: mol_type = other RNA
tgatcgtggttacagtaat

SEQ ID NO: 2967 - RNA, 19 nt, synthetic construct
  source 1..19: mol_type = other RNA
ctgatcgtggttacagtaa

SEQ ID NO: 2968 - RNA, 19 nt, synthetic construct
  source 1..19: mol_type = other RNA
actgatcgtggttacagta

SEQ ID NO: 2969 - RNA, 19 nt, synthetic construct
  source 1..19: mol_type = other RNA
aactgatcgtggttacagt

SEQ ID NO: 2970 - RNA, 19 nt, synthetic construct
  source 1..19: mol_type = other RNA
caactgatcgtggttacag

SEQ ID NO: 2971 - RNA, 19 nt, synthetic construct
  source 1..19: mol_type = other RNA
acaactgatcgtggttaca

SEQ ID NO: 2972 - RNA, 19 nt, synthetic construct
  source 1..19: mol_type = other RNA
gacaactgatcgtggttac

SEQ ID NO: 2973 - RNA, 19 nt, synthetic construct
  source 1..19: mol_type = other RNA
tgacaactgatcgtggtta

SEQ ID NO: 2974 - RNA, 19 nt, synthetic construct
  source 1..19: mol_type = other RNA
ttgacaactgatcgtggtt

SEQ ID NO: 2975 - RNA, 19 nt, synthetic construct
  source 1..19: mol_type = other RNA
cttgacaactgatcgtggt

SEQ ID NO: 2976 - RNA, 19 nt, synthetic construct
  source 1..19: mol_type = other RNA
acttgacaactgatcgtgg

SEQ ID NO: 2977 - RNA, 19 nt, synthetic construct
  source 1..19: mol_type = other RNA
tacttgacaactgatcgtg

SEQ ID NO: 2978 - RNA, 19 nt, synthetic construct
  source 1..19: mol_type = other RNA
ttacttgacaactgatcgt

SEQ ID NO: 2979 - RNA, 19 nt, synthetic construct
  source 1..19: mol_type = other RNA
attacttgacaactgatcg

SEQ ID NO: 2980 - RNA, 19 nt, synthetic construct
  source 1..19: mol_type = other RNA
aattacttgacaactgatc

SEQ ID NO: 2981 - RNA, 19 nt, synthetic construct
  source 1..19: mol_type = other RNA
caattacttgacaactgat

SEQ ID NO: 2982 - RNA, 19 nt, synthetic construct
  source 1..19: mol_type = other RNA
acaattacttgacaactga

SEQ ID NO: 2983 - RNA, 19 nt, synthetic construct
  source 1..19: mol_type = other RNA
aacaattacttgacaactg

SEQ ID NO: 2984 - RNA, 19 nt, synthetic construct
  source 1..19: mol_type = other RNA
taacaattacttgacaact

SEQ ID NO: 2985 - RNA, 19 nt, synthetic construct
  source 1..19: mol_type = other RNA
gtaacaattacttgacaac

SEQ ID NO: 2986 - RNA, 19 nt, synthetic construct
  source 1..19: mol_type = other RNA
tgtaacaattacttgacaa

SEQ ID NO: 2987 - RNA, 19 nt, synthetic construct
  source 1..19: mol_type = other RNA
atgtaacaattacttgaca

SEQ ID NO: 2988 - RNA, 19 nt, synthetic construct
  source 1..19: mol_type = other RNA
catgtaacaattacttgac

SEQ ID NO: 2989 - RNA, 19 nt, synthetic construct
  source 1..19: mol_type = other RNA
tcatgtaacaattacttga

SEQ ID NO: 2990 - RNA, 19 nt, synthetic construct
  source 1..19: mol_type = other RNA
gtcatgtaacaattacttg

SEQ ID NO: 2991 - RNA, 19 nt, synthetic construct
  source 1..19: mol_type = other RNA
agtcatgtaacaattactt

SEQ ID NO: 2992 - RNA, 19 nt, synthetic construct
  source 1..19: mol_type = other RNA
tagtcatgtaacaattact

SEQ ID NO: 2993 - RNA, 19 nt, synthetic construct
  source 1..19: mol_type = other RNA
atagtcatgtaacaattac

SEQ ID NO: 2994 - RNA, 19 nt, synthetic construct
  source 1..19: mol_type = other RNA
catagtcatgtaacaatta

SEQ ID NO: 2995 - RNA, 19 nt, synthetic construct
  source 1..19: mol_type = other RNA
acatagtcatgtaacaatt

SEQ ID NO: 2996 - RNA, 19 nt, synthetic construct
  source 1..19: mol_type = other RNA
gacatagtcatgtaacaat

SEQ ID NO: 2997 - RNA, 19 nt, synthetic construct
  source 1..19: mol_type = other RNA
ggacatagtcatgtaacaa

SEQ ID NO: 2998 - RNA, 19 nt, synthetic construct
  source 1..19: mol_type = other RNA
tggacatagtcatgtaaca

SEQ ID NO: 2999 - RNA, 19 nt, synthetic construct
  source 1..19: mol_type = other RNA
atggacatagtcatgtaac

SEQ ID NO: 3000 - RNA, 19 nt, synthetic construct
  source 1..19: mol_type = other RNA
aatggacatagtcatgtaa

SEQ ID NO: 3001 - RNA, 19 nt, synthetic construct
  source 1..19: mol_type = other RNA
aaatggacatagtcatgta

SEQ ID NO: 3002 - RNA, 19 nt, synthetic construct
  source 1..19: mol_type = other RNA
aaaatggacatagtcatgt

SEQ ID NO: 3003 - RNA, 19 nt, synthetic construct
  source 1..19: mol_type = other RNA
taaaatggacatagtcatg

SEQ ID NO: 3004 - RNA, 19 nt, synthetic construct
  source 1..19: mol_type = other RNA
ttaaaatggacatagtcat

SEQ ID NO: 3005 - RNA, 19 nt, synthetic construct
  source 1..19: mol_type = other RNA
attaaaatggacatagtca

SEQ ID NO: 3006 - RNA, 19 nt, synthetic construct
  source 1..19: mol_type = other RNA
cattaaaatggacatagtc

SEQ ID NO: 3007 - RNA, 19 nt, synthetic construct
  source 1..19: mol_type = other RNA
ccattaaaatggacatagt

SEQ ID NO: 3008 - RNA, 19 nt, synthetic construct
  source 1..19: mol_type = other RNA
cccattaaaatggacatag

SEQ ID NO: 3009 - RNA, 19 nt, synthetic construct
  source 1..19: mol_type = other RNA
acccattaaaatggacata

SEQ ID NO: 3010 - RNA, 19 nt, synthetic construct
  source 1..19: mol_type = other RNA
tacccattaaaatggacat

SEQ ID NO: 3011 - RNA, 19 nt, synthetic construct
  source 1..19: mol_type = other RNA
gtacccattaaaatggaca

SEQ ID NO: 3012 - RNA, 19 nt, synthetic construct
  source 1..19: mol_type = other RNA
cgtacccattaaaatggac

SEQ ID NO: 3013 - RNA, 19 nt, synthetic construct
  source 1..19: mol_type = other RNA
ccgtacccattaaaatgga

SEQ ID NO: 3014 - RNA, 19 nt, synthetic construct
  source 1..19: mol_type = other RNA
tccgtacccattaaaatgg

SEQ ID NO: 3015 - RNA, 19 nt, synthetic construct
  source 1..19: mol_type = other RNA
atccgtacccattaaaatg

SEQ ID NO: 3016 - RNA, 19 nt, synthetic construct
  source 1..19: mol_type = other RNA
catccgtacccattaaaat

SEQ ID NO: 3017 - RNA, 19 nt, synthetic construct
  source 1..19: mol_type = other RNA
ccatccgtacccattaaaa

SEQ ID NO: 3018 - RNA, 19 nt, synthetic construct
  source 1..19: mol_type = other RNA
gccatccgtacccattaaa

SEQ ID NO: 3019 - RNA, 19 nt, synthetic construct
  source 1..19: mol_type = other RNA
tgccatccgtacccattaa

SEQ ID NO: 3020 - RNA, 19 nt, synthetic construct
  source 1..19: mol_type = other RNA
atgccatccgtacccatta

SEQ ID NO: 3021 - RNA, 19 nt, synthetic construct
  source 1..19: mol_type = other RNA
catgccatccgtacccatt

SEQ ID NO: 3022 - RNA, 19 nt, synthetic construct
  source 1..19: mol_type = other RNA
ccatgccatccgtacccat

SEQ ID NO: 3023 - RNA, 19 nt, synthetic construct
  source 1..19: mol_type = other RNA
accatgccatccgtaccca

SEQ ID NO: 3024 - RNA, 19 nt, synthetic construct
  source 1..19: mol_type = other RNA
caccatgccatccgtaccc

SEQ ID NO: 3025 - RNA, 19 nt, synthetic construct
  source 1..19: mol_type = other RNA
gcaccatgccatccgtacc

SEQ ID NO: 3026 - RNA, 19 nt, synthetic construct
  source 1..19: mol_type = other RNA
agcaccatgccatccgtac

SEQ ID NO: 3027 - RNA, 19 nt, synthetic construct
  source 1..19: mol_type = other RNA
gagcaccatgccatccgta

SEQ ID NO: 3028 - RNA, 19 nt, synthetic construct
  source 1..19: mol_type = other RNA
ggagcaccatgccatccgt

SEQ ID NO: 3029 - RNA, 19 nt, synthetic construct
  source 1..19: mol_type = other RNA
aggagcaccatgccatccg

SEQ ID NO: 3030 - RNA, 19 nt, synthetic construct
  source 1..19: mol_type = other RNA
gaggagcaccatgccatcc

SEQ ID NO: 3031 - RNA, 19 nt, synthetic construct
  source 1..19: mol_type = other RNA
agaggagcaccatgccatc

SEQ ID NO: 3032 - RNA, 19 nt, synthetic construct
  source 1..19: mol_type = other RNA
aagaggagcaccatgccat

SEQ ID NO: 3033 - RNA, 19 nt, synthetic construct
  source 1..19: mol_type = other RNA
taagaggagcaccatgcca

SEQ ID NO: 3034 - RNA, 19 nt, synthetic construct
  source 1..19: mol_type = other RNA
ttaagaggagcaccatgcc

SEQ ID NO: 3035 - RNA, 19 nt, synthetic construct
  source 1..19: mol_type = other RNA
cttaagaggagcaccatgc

SEQ ID NO: 3036 - RNA, 19 nt, synthetic construct
  source 1..19: mol_type = other RNA
acttaagaggagcaccatg

SEQ ID NO: 3037 - RNA, 19 nt, synthetic construct
  source 1..19: mol_type = other RNA
cacttaagaggagcaccat

SEQ ID NO: 3038 - RNA, 19 nt, synthetic construct
  source 1..19: mol_type = other RNA
acacttaagaggagcacca

SEQ ID NO: 3039 - RNA, 19 nt, synthetic construct
  source 1..19: mol_type = other RNA
cacacttaagaggagcacc

SEQ ID NO: 3040 - RNA, 19 nt, synthetic construct
  source 1..19: mol_type = other RNA
gcacacttaagaggagcac

SEQ ID NO: 3041 - RNA, 19 nt, synthetic construct
  source 1..19: mol_type = other RNA
agcacacttaagaggagca

SEQ ID NO: 3042 - RNA, 19 nt, synthetic construct
  source 1..19: mol_type = other RNA
cagcacacttaagaggagc

SEQ ID NO: 3043 - RNA, 19 nt, synthetic construct
  source 1..19: mol_type = other RNA
ccagcacacttaagaggag

SEQ ID NO: 3044 - RNA, 19 nt, synthetic construct
  source 1..19: mol_type = other RNA
tccagcacacttaagagga

SEQ ID NO: 3045 - RNA, 19 nt, synthetic construct
  source 1..19: mol_type = other RNA
ttccagcacacttaagagg

SEQ ID NO: 3046 - RNA, 19 nt, synthetic construct
  source 1..19: mol_type = other RNA
attccagcacacttaagag

SEQ ID NO: 3047 - RNA, 19 nt, synthetic construct
  source 1..19: mol_type = other RNA
aattccagcacacttaaga

SEQ ID NO: 3048 - RNA, 19 nt, synthetic construct
  source 1..19: mol_type = other RNA
gaattccagcacacttaag

SEQ ID NO: 3049 - RNA, 19 nt, synthetic construct
  source 1..19: mol_type = other RNA
agaattccagcacacttaa

SEQ ID NO: 3050 - RNA, 19 nt, synthetic construct
  source 1..19: mol_type = other RNA
cagaattccagcacactta

SEQ ID NO: 3051 - RNA, 19 nt, synthetic construct
  source 1..19: mol_type = other RNA
gcagaattccagcacactt

SEQ ID NO: 3052 - RNA, 19 nt, synthetic construct
  source 1..19: mol_type = other RNA
tgcagaattccagcacact

SEQ ID NO: 3053 - RNA, 19 nt, synthetic construct
  source 1..19: mol_type = other RNA
atgcagaattccagcacac

SEQ ID NO: 3054 - RNA, 19 nt, synthetic construct
  source 1..19: mol_type = other RNA
aatgcagaattccagcaca

SEQ ID NO: 3055 - RNA, 19 nt, synthetic construct
  source 1..19: mol_type = other RNA
caatgcagaattccagcac

SEQ ID NO: 3056 - RNA, 19 nt, synthetic construct
  source 1..19: mol_type = other RNA
gcaatgcagaattccagca

SEQ ID NO: 3057 - RNA, 19 nt, synthetic construct
  source 1..19: mol_type = other RNA
agcaatgcagaattccagc

SEQ ID NO: 3058 - RNA, 19 nt, synthetic construct
  source 1..19: mol_type = other RNA
cagcaatgcagaattccag

SEQ ID NO: 3059 - RNA, 19 nt, synthetic construct
  source 1..19: mol_type = other RNA
acagcaatgcagaattcca

SEQ ID NO: 3060 - RNA, 19 nt, synthetic construct
  source 1..19: mol_type = other RNA
cacagcaatgcagaattcc

SEQ ID NO: 3061 - RNA, 19 nt, synthetic construct
  source 1..19: mol_type = other RNA
ccacagcaatgcagaattc

SEQ ID NO: 3062 - RNA, 19 nt, synthetic construct
  source 1..19: mol_type = other RNA
gccacagcaatgcagaatt

SEQ ID NO: 3063 - RNA, 19 nt, synthetic construct
  source 1..19: mol_type = other RNA
ggccacagcaatgcagaat

SEQ ID NO: 3064 - RNA, 19 nt, synthetic construct
  source 1..19: mol_type = other RNA
gggccacagcaatgcagaa

SEQ ID NO: 3065 - RNA, 19 nt, synthetic construct
  source 1..19: mol_type = other RNA
agggccacagcaatgcaga

SEQ ID NO: 3066 - RNA, 19 nt, synthetic construct
  source 1..19: mol_type = other RNA
gagggccacagcaatgcag

SEQ ID NO: 3067 - RNA, 19 nt, synthetic construct
  source 1..19: mol_type = other RNA
agagggccacagcaatgca

SEQ ID NO: 3068 - RNA, 19 nt, synthetic construct
  source 1..19: mol_type = other RNA
gagagggccacagcaatgc

SEQ ID NO: 3069 - RNA, 19 nt, synthetic construct
  source 1..19: mol_type = other RNA
agagagggccacagcaatg

SEQ ID NO: 3070 - RNA, 19 nt, synthetic construct
  source 1..19: mol_type = other RNA
cagagagggccacagcaat

SEQ ID NO: 3071 - RNA, 19 nt, synthetic construct
  source 1..19: mol_type = other RNA
gcagagagggccacagcaa

SEQ ID NO: 3072 - RNA, 19 nt, synthetic construct
  source 1..19: mol_type = other RNA
ggcagagagggccacagca

SEQ ID NO: 3073 - RNA, 19 nt, synthetic construct
  source 1..19: mol_type = other RNA
aggcagagagggccacagc

SEQ ID NO: 3074 - RNA, 19 nt, synthetic construct
  source 1..19: mol_type = other RNA
aaggcagagagggccacag

SEQ ID NO: 3075 - RNA, 19 nt, synthetic construct
  source 1..19: mol_type = other RNA
aaaggcagagagggccaca

SEQ ID NO: 3076 - RNA, 19 nt, synthetic construct
  source 1..19: mol_type = other RNA
caaaggcagagagggccac

SEQ ID NO: 3077 - RNA, 19 nt, synthetic construct
  source 1..19: mol_type = other RNA
ccaaaggcagagagggcca

SEQ ID NO: 3078 - RNA, 19 nt, synthetic construct
  source 1..19: mol_type = other RNA
tccaaaggcagagagggcc

SEQ ID NO: 3079 - RNA, 19 nt, synthetic construct
  source 1..19: mol_type = other RNA
atccaaaggcagagagggc

SEQ ID NO: 3080 - RNA, 19 nt, synthetic construct
  source 1..19: mol_type = other RNA
catccaaaggcagagaggg

SEQ ID NO: 3081 - RNA, 19 nt, synthetic construct
  source 1..19: mol_type = other RNA
acatccaaaggcagagagg

SEQ ID NO: 3082 - RNA, 19 nt, synthetic construct
  source 1..19: mol_type = other RNA
tacatccaaaggcagagag

SEQ ID NO: 3083 - RNA, 19 nt, synthetic construct
  source 1..19: mol_type = other RNA
ttacatccaaaggcagaga

SEQ ID NO: 3084 - RNA, 19 nt, synthetic construct
  source 1..19: mol_type = other RNA
tttacatccaaaggcagag

SEQ ID NO: 3085 - RNA, 19 nt, synthetic construct
  source 1..19: mol_type = other RNA
ctttacatccaaaggcaga

SEQ ID NO: 3086 - RNA, 19 nt, synthetic construct
  source 1..19: mol_type = other RNA
actttacatccaaaggcag

SEQ ID NO: 3087 - RNA, 19 nt, synthetic construct
  source 1..19: mol_type = other RNA
cactttacatccaaaggca

SEQ ID NO: 3088 - RNA, 19 nt, synthetic construct
  source 1..19: mol_type = other RNA
gcactttacatccaaaggc

SEQ ID NO: 3089 - RNA, 19 nt, synthetic construct
  source 1..19: mol_type = other RNA
agcactttacatccaaagg

SEQ ID NO: 3090 - RNA, 19 nt, synthetic construct
  source 1..19: mol_type = other RNA
aagcactttacatccaaag

SEQ ID NO: 3091 - RNA, 19 nt, synthetic construct
  source 1..19: mol_type = other RNA
aaagcactttacatccaaa

SEQ ID NO: 3092 - RNA, 19 nt, synthetic construct
  source 1..19: mol_type = other RNA
caaagcactttacatccaa

SEQ ID NO: 3093 - RNA, 19 nt, synthetic construct
  source 1..19: mol_type = other RNA
acaaagcactttacatcca

SEQ ID NO: 3094 - RNA, 19 nt, synthetic construct
  source 1..19: mol_type = other RNA
aacaaagcactttacatcc

SEQ ID NO: 3095 - RNA, 19 nt, synthetic construct
  source 1..19: mol_type = other RNA
caacaaagcactttacatc

SEQ ID NO: 3096 - RNA, 19 nt, synthetic construct
  source 1..19: mol_type = other RNA
acaacaaagcactttacat

SEQ ID NO: 3097 - RNA, 19 nt, synthetic construct
  source 1..19: mol_type = other RNA
tacaacaaagcactttaca

SEQ ID NO: 3098 - RNA, 19 nt, synthetic construct
  source 1..19: mol_type = other RNA
ctacaacaaagcactttac

SEQ ID NO: 3099 - RNA, 19 nt, synthetic construct
  source 1..19: mol_type = other RNA
gctacaacaaagcacttta

SEQ ID NO: 3100 - RNA, 19 nt, synthetic construct
  source 1..19: mol_type = other RNA
ggctacaacaaagcacttt

SEQ ID NO: 3101 - RNA, 19 nt, synthetic construct
  source 1..19: mol_type = other RNA
gggctacaacaaagcactt

SEQ ID NO: 3102 - RNA, 19 nt, synthetic construct
  source 1..19: mol_type = other RNA
ggggctacaacaaagcact

SEQ ID NO: 3103 - RNA, 19 nt, synthetic construct
  source 1..19: mol_type = other RNA
tggggctacaacaaagcac

SEQ ID NO: 3104 - RNA, 19 nt, synthetic construct
  source 1..19: mol_type = other RNA
ctggggctacaacaaagca

SEQ ID NO: 3105 - RNA, 19 nt, synthetic construct
  source 1..19: mol_type = other RNA
actggggctacaacaaagc

SEQ ID NO: 3106 - RNA, 19 nt, synthetic construct
  source 1..19: mol_type = other RNA
cactggggctacaacaaag

SEQ ID NO: 3107 - RNA, 19 nt, synthetic construct
  source 1..19: mol_type = other RNA
tcactggggctacaacaaa

SEQ ID NO: 3108 - RNA, 19 nt, synthetic construct
  source 1..19: mol_type = other RNA
ctcactggggctacaacaa

SEQ ID NO: 3109 - RNA, 19 nt, synthetic construct
  source 1..19: mol_type = other RNA
tctcactggggctacaaca

SEQ ID NO: 3110 - RNA, 19 nt, synthetic construct
  source 1..19: mol_type = other RNA
ctctcactggggctacaac

SEQ ID NO: 3111 - RNA, 19 nt, synthetic construct
  source 1..19: mol_type = other RNA
gctctcactggggctacaa

SEQ ID NO: 3112 - RNA, 19 nt, synthetic construct
  source 1..19: mol_type = other RNA
tgctctcactggggctaca

SEQ ID NO: 3113 - RNA, 19 nt, synthetic construct
  source 1..19: mol_type = other RNA
ttgctctcactggggctac

SEQ ID NO: 3114 - RNA, 19 nt, synthetic construct
  source 1..19: mol_type = other RNA
tttgctctcactggggcta

SEQ ID NO: 3115 - RNA, 19 nt, synthetic construct
  source 1..19: mol_type = other RNA
ttttgctctcactggggct

SEQ ID NO: 3116 - RNA, 19 nt, synthetic construct
  source 1..19: mol_type = other RNA
tttttgctctcactggggc

SEQ ID NO: 3117 - RNA, 19 nt, synthetic construct
  source 1..19: mol_type = other RNA
atttttgctctcactgggg

SEQ ID NO: 3118 - RNA, 19 nt, synthetic construct
  source 1..19: mol_type = other RNA
tatttttgctctcactggg

SEQ ID NO: 3119 - RNA, 19 nt, synthetic construct
  source 1..19: mol_type = other RNA
ttatttttgctctcactgg

SEQ ID NO: 3120 - RNA, 19 nt, synthetic construct
  source 1..19: mol_type = other RNA
tttatttttgctctcactg

SEQ ID NO: 3121 - RNA, 19 nt, synthetic construct
  source 1..19: mol_type = other RNA
ttttatttttgctctcact

SEQ ID NO: 3122 - RNA, 19 nt, synthetic construct
  source 1..19: mol_type = other RNA
attttatttttgctctcac

SEQ ID NO: 3123 - RNA, 19 nt, synthetic construct
  source 1..19: mol_type = other RNA
aattttatttttgctctca

SEQ ID NO: 3124 - RNA, 19 nt, synthetic construct
  source 1..19: mol_type = other RNA
taattttatttttgctctc

SEQ ID NO: 3125 - RNA, 19 nt, synthetic construct
  source 1..19: mol_type = other RNA
ctaattttatttttgctct

SEQ ID NO: 3126 - RNA, 19 nt, synthetic construct
  source 1..19: mol_type = other RNA
tctaattttatttttgctc

SEQ ID NO: 3127 - RNA, 19 nt, synthetic construct
  source 1..19: mol_type = other RNA
ttctaattttatttttgct

SEQ ID NO: 3128 - RNA, 19 nt, synthetic construct
  source 1..19: mol_type = other RNA
cttctaattttatttttgc

SEQ ID NO: 3129 - RNA, 19 nt, synthetic construct
  source 1..19: mol_type = other RNA
gcttctaattttatttttg

SEQ ID NO: 3130 - RNA, 19 nt, synthetic construct
  source 1..19: mol_type = other RNA
tgcttctaattttattttt

SEQ ID NO: 3131 - RNA, 19 nt, synthetic construct
  source 1..19: mol_type = other RNA
ttgcttctaattttatttt

SEQ ID NO: 3132 - RNA, 19 nt, synthetic construct
  source 1..19: mol_type = other RNA
attgcttctaattttattt

SEQ ID NO: 3133 - RNA, 19 nt, synthetic construct
  source 1..19: mol_type = other RNA
tattgcttctaattttatt

SEQ ID NO: 3134 - RNA, 19 nt, synthetic construct
  source 1..19: mol_type = other RNA
gtattgcttctaattttat

SEQ ID NO: 3135 - RNA, 19 nt, synthetic construct
  source 1..19: mol_type = other RNA
agtattgcttctaatttta

SEQ ID NO: 3136 - RNA, 19 nt, synthetic construct
  source 1..19: mol_type = other RNA
aagtattgcttctaatttt

SEQ ID NO: 3137 - RNA, 19 nt, synthetic construct
  source 1..19: mol_type = other RNA
aaagtattgcttctaattt

SEQ ID NO: 3138 - RNA, 19 nt, synthetic construct
  source 1..19: mol_type = other RNA
gaaagtattgcttctaatt

SEQ ID NO: 3139 - RNA, 19 nt, synthetic construct
  source 1..19: mol_type = other RNA
tgaaagtattgcttctaat

SEQ ID NO: 3140 - RNA, 19 nt, synthetic construct
  source 1..19: mol_type = other RNA
atgaaagtattgcttctaa

SEQ ID NO: 3141 - RNA, 19 nt, synthetic construct
  source 1..19: mol_type = other RNA
catgaaagtattgcttcta

SEQ ID NO: 3142 - RNA, 19 nt, synthetic construct
  source 1..19: mol_type = other RNA
acatgaaagtattgcttct

SEQ ID NO: 3143 - RNA, 19 nt, synthetic construct
  source 1..19: mol_type = other RNA
cacatgaaagtattgcttc

SEQ ID NO: 3144 - RNA, 19 nt, synthetic construct
  source 1..19: mol_type = other RNA
gcacatgaaagtattgctt

SEQ ID NO: 3145 - RNA, 19 nt, synthetic construct
  source 1..19: mol_type = other RNA
agcacatgaaagtattgct

SEQ ID NO: 3146 - RNA, 19 nt, synthetic construct
  source 1..19: mol_type = other RNA
tagcacatgaaagtattgc

SEQ ID NO: 3147 - RNA, 19 nt, synthetic construct
  source 1..19: mol_type = other RNA
gtagcacatgaaagtattg

SEQ ID NO: 3148 - RNA, 19 nt, synthetic construct
  source 1..19: mol_type = other RNA
ggtagcacatgaaagtatt

SEQ ID NO: 3149 - RNA, 19 nt, synthetic construct
  source 1..19: mol_type = other RNA
aggtagcacatgaaagtat

SEQ ID NO: 3150 - RNA, 19 nt, synthetic construct
  source 1..19: mol_type = other RNA
gaggtagcacatgaaagta

SEQ ID NO: 3151 - RNA, 19 nt, synthetic construct
  source 1..19: mol_type = other RNA
ggaggtagcacatgaaagt

SEQ ID NO: 3152 - RNA, 19 nt, synthetic construct
  source 1..19: mol_type = other RNA
aggaggtagcacatgaaag

SEQ ID NO: 3153 - RNA, 19 nt, synthetic construct
  source 1..19: mol_type = other RNA
aaggaggtagcacatgaaa

SEQ ID NO: 3154 - RNA, 19 nt, synthetic construct
  source 1..19: mol_type = other RNA
aaaggaggtagcacatgaa

SEQ ID NO: 3155 - RNA, 19 nt, synthetic construct
  source 1..19: mol_type = other RNA
gaaaggaggtagcacatga

SEQ ID NO: 3156 - RNA, 19 nt, synthetic construct
  source 1..19: mol_type = other RNA
agaaaggaggtagcacatg

SEQ ID NO: 3157 - RNA, 19 nt, synthetic construct
  source 1..19: mol_type = other RNA
tagaaaggaggtagcacat

SEQ ID NO: 3158 - RNA, 19 nt, synthetic construct
  source 1..19: mol_type = other RNA
atagaaaggaggtagcaca

SEQ ID NO: 3159 - RNA, 19 nt, synthetic construct
  source 1..19: mol_type = other RNA
aatagaaaggaggtagcac

SEQ ID NO: 3160 - RNA, 19 nt, synthetic construct
  source 1..19: mol_type = other RNA
gaatagaaaggaggtagca

SEQ ID NO: 3161 - RNA, 19 nt, synthetic construct
  source 1..19: mol_type = other RNA
tgaatagaaaggaggtagc

SEQ ID NO: 3162 - RNA, 19 nt, synthetic construct
  source 1..19: mol_type = other RNA
ctgaatagaaaggaggtag

SEQ ID NO: 3163 - RNA, 19 nt, synthetic construct
  source 1..19: mol_type = other RNA
tctgaatagaaaggaggta

SEQ ID NO: 3164 - RNA, 19 nt, synthetic construct
  source 1..19: mol_type = other RNA
atctgaatagaaaggaggt

SEQ ID NO: 3165 - RNA, 19 nt, synthetic construct
  source 1..19: mol_type = other RNA
catctgaatagaaaggagg

SEQ ID NO: 3166 - RNA, 19 nt, synthetic construct
  source 1..19: mol_type = other RNA
gcatctgaatagaaaggag

SEQ ID NO: 3167 - RNA, 19 nt, synthetic construct
  source 1..19: mol_type = other RNA
tgcatctgaatagaaagga

SEQ ID NO: 3168 - RNA, 19 nt, synthetic construct
  source 1..19: mol_type = other RNA
ttgcatctgaatagaaagg

SEQ ID NO: 3169 - RNA, 19 nt, synthetic construct
  source 1..19: mol_type = other RNA
attgcatctgaatagaaag

SEQ ID NO: 3170 - RNA, 19 nt, synthetic construct
  source 1..19: mol_type = other RNA
tattgcatctgaatagaaa

SEQ ID NO: 3171 - RNA, 19 nt, synthetic construct
  source 1..19: mol_type = other RNA
atattgcatctgaatagaa

SEQ ID NO: 3172 - RNA, 19 nt, synthetic construct
  source 1..19: mol_type = other RNA
catattgcatctgaataga

SEQ ID NO: 3173 - RNA, 19 nt, synthetic construct
  source 1..19: mol_type = other RNA
tcatattgcatctgaatag

SEQ ID NO: 3174 - RNA, 19 nt, synthetic construct
  source 1..19: mol_type = other RNA
atcatattgcatctgaata

SEQ ID NO: 3175 - RNA, 19 nt, synthetic construct
  source 1..19: mol_type = other RNA
catcatattgcatctgaat

SEQ ID NO: 3176 - RNA, 19 nt, synthetic construct
  source 1..19: mol_type = other RNA
ccatcatattgcatctgaa

SEQ ID NO: 3177 - RNA, 19 nt, synthetic construct
  source 1..19: mol_type = other RNA
tccatcatattgcatctga

SEQ ID NO: 3178 - RNA, 19 nt, synthetic construct
  source 1..19: mol_type = other RNA
ttccatcatattgcatctg

SEQ ID NO: 3179 - RNA, 19 nt, synthetic construct
  source 1..19: mol_type = other RNA
tttccatcatattgcatct

SEQ ID NO: 3180 - RNA, 19 nt, synthetic construct
  source 1..19: mol_type = other RNA
ctttccatcatattgcatc

SEQ ID NO: 3181 - RNA, 19 nt, synthetic construct
  source 1..19: mol_type = other RNA
tctttccatcatattgcat

SEQ ID NO: 3182 - RNA, 19 nt, synthetic construct
  source 1..19: mol_type = other RNA
ctctttccatcatattgca

SEQ ID NO: 3183 - RNA, 19 nt, synthetic construct
  source 1..19: mol_type = other RNA
tctctttccatcatattgc

SEQ ID NO: 3184 - RNA, 19 nt, synthetic construct
  source 1..19: mol_type = other RNA
gtctctttccatcatattg

SEQ ID NO: 3185 - RNA, 19 nt, synthetic construct
  source 1..19: mol_type = other RNA
agtctctttccatcatatt

SEQ ID NO: 3186 - RNA, 19 nt, synthetic construct
  source 1..19: mol_type = other RNA
tagtctctttccatcatat

SEQ ID NO: 3187 - RNA, 19 nt, synthetic construct
  source 1..19: mol_type = other RNA
ttagtctctttccatcata

SEQ ID NO: 3188 - RNA, 19 nt, synthetic construct
  source 1..19: mol_type = other RNA
tttagtctctttccatcat

SEQ ID NO: 3189 - RNA, 19 nt, synthetic construct
  source 1..19: mol_type = other RNA
atttagtctctttccatca

SEQ ID NO: 3190 - RNA, 19 nt, synthetic construct
  source 1..19: mol_type = other RNA
catttagtctctttccatc

SEQ ID NO: 3191 - RNA, 19 nt, synthetic construct
  source 1..19: mol_type = other RNA
acatttagtctctttccat

SEQ ID NO: 3192 - RNA, 19 nt, synthetic construct
  source 1..19: mol_type = other RNA
aacatttagtctctttcca

SEQ ID NO: 3193 - RNA, 19 nt, synthetic construct
  source 1..19: mol_type = other RNA
caacatttagtctctttcc

SEQ ID NO: 3194 - RNA, 19 nt, synthetic construct
  source 1..19: mol_type = other RNA
tcaacatttagtctctttc

SEQ ID NO: 3195 - RNA, 19 nt, synthetic construct
  source 1..19: mol_type = other RNA
atcaacatttagtctcttt

SEQ ID NO: 3196 - RNA, 19 nt, synthetic construct
  source 1..19: mol_type = other RNA
catcaacatttagtctctt

SEQ ID NO: 3197 - RNA, 19 nt, synthetic construct
  source 1..19: mol_type = other RNA
acatcaacatttagtctct

SEQ ID NO: 3198 - RNA, 19 nt, synthetic construct
  source 1..19: mol_type = other RNA
gacatcaacatttagtctc

SEQ ID NO: 3199 - RNA, 19 nt, synthetic construct
  source 1..19: mol_type = other RNA
cgacatcaacatttagtct

SEQ ID NO: 3200 - RNA, 19 nt, synthetic construct
  source 1..19: mol_type = other RNA
tcgacatcaacatttagtc

SEQ ID NO: 3201 - RNA, 19 nt, synthetic construct
  source 1..19: mol_type = other RNA
gtcgacatcaacatttagt

SEQ ID NO: 3202 - RNA, 19 nt, synthetic construct
  source 1..19: mol_type = other RNA
tgtcgacatcaacatttag

SEQ ID NO: 3203 - RNA, 19 nt, synthetic construct
  source 1..19: mol_type = other RNA
ctgtcgacatcaacattta

SEQ ID NO: 3204 - RNA, 19 nt, synthetic construct
  source 1..19: mol_type = other RNA
actgtcgacatcaacattt

SEQ ID NO: 3205 - RNA, 19 nt, synthetic construct
  source 1..19: mol_type = other RNA
tactgtcgacatcaacatt

SEQ ID NO: 3206 - RNA, 19 nt, synthetic construct
  source 1..19: mol_type = other RNA
gtactgtcgacatcaacat

SEQ ID NO: 3207 - RNA, 19 nt, synthetic construct
  source 1..19: mol_type = other RNA
agtactgtcgacatcaaca

SEQ ID NO: 3208 - RNA, 19 nt, synthetic construct
  source 1..19: mol_type = other RNA
cagtactgtcgacatcaac

SEQ ID NO: 3209 - RNA, 19 nt, synthetic construct
  source 1..19: mol_type = other RNA
acagtactgtcgacatcaa

SEQ ID NO: 3210 - RNA, 19 nt, synthetic construct
  source 1..19: mol_type = other RNA
tacagtactgtcgacatca

SEQ ID NO: 3211 - RNA, 19 nt, synthetic construct
  source 1..19: mol_type = other RNA
atacagtactgtcgacatc

SEQ ID NO: 3212 - RNA, 19 nt, synthetic construct
  source 1..19: mol_type = other RNA
catacagtactgtcgacat

SEQ ID NO: 3213 - RNA, 19 nt, synthetic construct
  source 1..19: mol_type = other RNA
ccatacagtactgtcgaca

SEQ ID NO: 3214 - RNA, 19 nt, synthetic construct
  source 1..19: mol_type = other RNA
accatacagtactgtcgac

SEQ ID NO: 3215 - RNA, 19 nt, synthetic construct
  source 1..19: mol_type = other RNA
caccatacagtactgtcga

SEQ ID NO: 3216 - RNA, 19 nt, synthetic construct
  source 1..19: mol_type = other RNA
gcaccatacagtactgtcg

SEQ ID NO: 3217 - RNA, 19 nt, synthetic construct
  source 1..19: mol_type = other RNA
agcaccatacagtactgtc

SEQ ID NO: 3218 - RNA, 19 nt, synthetic construct
  source 1..19: mol_type = other RNA
gagcaccatacagtactgt

SEQ ID NO: 3219 - RNA, 19 nt, synthetic construct
  source 1..19: mol_type = other RNA
ggagcaccatacagtactg

SEQ ID NO: 3220 - RNA, 19 nt, synthetic construct
  source 1..19: mol_type = other RNA
cggagcaccatacagtact

SEQ ID NO: 3221 - RNA, 19 nt, synthetic construct
  source 1..19: mol_type = other RNA
ccggagcaccatacagtac

SEQ ID NO: 3222 - RNA, 19 nt, synthetic construct
  source 1..19: mol_type = other RNA
tccggagcaccatacagta

SEQ ID NO: 3223 - RNA, 19 nt, synthetic construct
  source 1..19: mol_type = other RNA
ctccggagcaccatacagt

SEQ ID NO: 3224 - RNA, 19 nt, synthetic construct
  source 1..19: mol_type = other RNA
tctccggagcaccatacag

SEQ ID NO: 3225 - RNA, 19 nt, synthetic construct
  source 1..19: mol_type = other RNA
atctccggagcaccataca

SEQ ID NO: 3226 - RNA, 19 nt, synthetic construct
  source 1..19: mol_type = other RNA
catctccggagcaccatac

SEQ ID NO: 3227 - RNA, 19 nt, synthetic construct
  source 1..19: mol_type = other RNA
ccatctccggagcaccata

SEQ ID NO: 3228 - RNA, 19 nt, synthetic construct
  source 1..19: mol_type = other RNA
tccatctccggagcaccat

SEQ ID NO: 3229 - RNA, 19 nt, synthetic construct
  source 1..19: mol_type = other RNA
gtccatctccggagcacca

SEQ ID NO: 3230 - RNA, 19 nt, synthetic construct
  source 1..19: mol_type = other RNA
tgtccatctccggagcacc

SEQ ID NO: 3231 - RNA, 19 nt, synthetic construct
  source 1..19: mol_type = other RNA
ctgtccatctccggagcac

SEQ ID NO: 3232 - RNA, 19 nt, synthetic construct
  source 1..19: mol_type = other RNA
actgtccatctccggagca

SEQ ID NO: 3233 - RNA, 19 nt, synthetic construct
  source 1..19: mol_type = other RNA
tactgtccatctccggagc

SEQ ID NO: 3234 - RNA, 19 nt, synthetic construct
  source 1..19: mol_type = other RNA
atactgtccatctccggag

SEQ ID NO: 3235 - RNA, 19 nt, synthetic construct
  source 1..19: mol_type = other RNA
gatactgtccatctccgga

SEQ ID NO: 3236 - RNA, 19 nt, synthetic construct
  source 1..19: mol_type = other RNA
agatactgtccatctccgg

SEQ ID NO: 3237 - RNA, 19 nt, synthetic construct
  source 1..19: mol_type = other RNA
cagatactgtccatctccg

SEQ ID NO: 3238 - RNA, 19 nt, synthetic construct
  source 1..19: mol_type = other RNA
ccagatactgtccatctcc

SEQ ID NO: 3239 - RNA, 19 nt, synthetic construct
  source 1..19: mol_type = other RNA
tccagatactgtccatctc

SEQ ID NO: 3240 - RNA, 19 nt, synthetic construct
  source 1..19: mol_type = other RNA
ttccagatactgtccatct

SEQ ID NO: 3241 - RNA, 19 nt, synthetic construct
  source 1..19: mol_type = other RNA
tttccagatactgtccatc

SEQ ID NO: 3242 - RNA, 19 nt, synthetic construct
  source 1..19: mol_type = other RNA
ttttccagatactgtccat

SEQ ID NO: 3243 - RNA, 19 nt, synthetic construct
  source 1..19: mol_type = other RNA
tttttccagatactgtcca

SEQ ID NO: 3244 - RNA, 19 nt, synthetic construct
  source 1..19: mol_type = other RNA
ctttttccagatactgtcc

SEQ ID NO: 3245 - RNA, 19 nt, synthetic construct
  source 1..19: mol_type = other RNA
actttttccagatactgtc

SEQ ID NO: 3246 - RNA, 19 nt, synthetic construct
  source 1..19: mol_type = other RNA
gactttttccagatactgt

SEQ ID NO: 3247 - RNA, 19 nt, synthetic construct
  source 1..19: mol_type = other RNA
agactttttccagatactg

SEQ ID NO: 3248 - RNA, 19 nt, synthetic construct
  source 1..19: mol_type = other RNA
tagactttttccagatact

SEQ ID NO: 3249 - RNA, 19 nt, synthetic construct
  source 1..19: mol_type = other RNA
atagactttttccagatac

SEQ ID NO: 3250 - RNA, 19 nt, synthetic construct
  source 1..19: mol_type = other RNA
aatagactttttccagata

SEQ ID NO: 3251 - RNA, 19 nt, synthetic construct
  source 1..19: mol_type = other RNA
taatagactttttccagat

SEQ ID NO: 3252 - RNA, 19 nt, synthetic construct
  source 1..19: mol_type = other RNA
ataatagactttttccaga

SEQ ID NO: 3253 - RNA, 19 nt, synthetic construct
  source 1..19: mol_type = other RNA
cataatagactttttccag

SEQ ID NO: 3254 - RNA, 19 nt, synthetic construct
  source 1..19: mol_type = other RNA
tcataatagactttttcca

SEQ ID NO: 3255 - RNA, 19 nt, synthetic construct
  source 1..19: mol_type = other RNA
gtcataatagactttttcc

SEQ ID NO: 3256 - RNA, 19 nt, synthetic construct
  source 1..19: mol_type = other RNA
tgtcataatagactttttc

SEQ ID NO: 3257 - RNA, 19 nt, synthetic construct
  source 1..19: mol_type = other RNA
atgtcataatagacttttt

SEQ ID NO: 3258 - RNA, 19 nt, synthetic construct
  source 1..19: mol_type = other RNA
aatgtcataatagactttt

SEQ ID NO: 3259 - RNA, 19 nt, synthetic construct
  source 1..19: mol_type = other RNA
gaatgtcataatagacttt

SEQ ID NO: 3260 - RNA, 19 nt, synthetic construct
  source 1..19: mol_type = other RNA
agaatgtcataatagactt

SEQ ID NO: 3261 - RNA, 19 nt, synthetic construct
  source 1..19: mol_type = other RNA
tagaatgtcataatagact

SEQ ID NO: 3262 - RNA, 19 nt, synthetic construct
  source 1..19: mol_type = other RNA
atagaatgtcataatagac

SEQ ID NO: 3263 - RNA, 19 nt, synthetic construct
  source 1..19: mol_type = other RNA
gatagaatgtcataataga

SEQ ID NO: 3264 - RNA, 19 nt, synthetic construct
  source 1..19: mol_type = other RNA
agatagaatgtcataatag

SEQ ID NO: 3265 - RNA, 19 nt, synthetic construct
  source 1..19: mol_type = other RNA
aagatagaatgtcataata

SEQ ID NO: 3266 - RNA, 19 nt, synthetic construct
  source 1..19: mol_type = other RNA
gaagatagaatgtcataat

SEQ ID NO: 3267 - RNA, 19 nt, synthetic construct
  source 1..19: mol_type = other RNA
agaagatagaatgtcataa

SEQ ID NO: 3268 - RNA, 19 nt, synthetic construct
  source 1..19: mol_type = other RNA
aagaagatagaatgtcata

SEQ ID NO: 3269 - RNA, 19 nt, synthetic construct
  source 1..19: mol_type = other RNA
caagaagatagaatgtcat

SEQ ID NO: 3270 - RNA, 19 nt, synthetic construct
  source 1..19: mol_type = other RNA
ccaagaagatagaatgtca

SEQ ID NO: 3271 - RNA, 19 nt, synthetic construct
  source 1..19: mol_type = other RNA
accaagaagatagaatgtc

SEQ ID NO: 3272 - RNA, 19 nt, synthetic construct
  source 1..19: mol_type = other RNA
aaccaagaagatagaatgt

SEQ ID NO: 3273 - RNA, 19 nt, synthetic construct
  source 1..19: mol_type = other RNA
caaccaagaagatagaatg

SEQ ID NO: 3274 - RNA, 19 nt, synthetic construct
  source 1..19: mol_type = other RNA
tcaaccaagaagatagaat

SEQ ID NO: 3275 - RNA, 19 nt, synthetic construct
  source 1..19: mol_type = other RNA
ctcaaccaagaagatagaa

SEQ ID NO: 3276 - RNA, 19 nt, synthetic construct
  source 1..19: mol_type = other RNA
cctcaaccaagaagataga

SEQ ID NO: 3277 - RNA, 19 nt, synthetic construct
  source 1..19: mol_type = other RNA
tcctcaaccaagaagatag

SEQ ID NO: 3278 - RNA, 19 nt, synthetic construct
  source 1..19: mol_type = other RNA
atcctcaaccaagaagata

SEQ ID NO: 3279 - RNA, 19 nt, synthetic construct
  source 1..19: mol_type = other RNA
aatcctcaaccaagaagat

SEQ ID NO: 3280 - RNA, 19 nt, synthetic construct
  source 1..19: mol_type = other RNA
caatcctcaaccaagaaga

SEQ ID NO: 3281 - RNA, 19 nt, synthetic construct
  source 1..19: mol_type = other RNA
tcaatcctcaaccaagaag

SEQ ID NO: 3282 - RNA, 19 nt, synthetic construct
  source 1..19: mol_type = other RNA
ttcaatcctcaaccaagaa

SEQ ID NO: 3283 - RNA, 19 nt, synthetic construct
  source 1..19: mol_type = other RNA
tttcaatcctcaaccaaga

SEQ ID NO: 3284 - RNA, 19 nt, synthetic construct
  source 1..19: mol_type = other RNA
ctttcaatcctcaaccaag

SEQ ID NO: 3285 - RNA, 19 nt, synthetic construct
  source 1..19: mol_type = other RNA
actttcaatcctcaaccaa

SEQ ID NO: 3286 - RNA, 19 nt, synthetic construct
  source 1..19: mol_type = other RNA
tactttcaatcctcaacca

SEQ ID NO: 3287 - RNA, 19 nt, synthetic construct
  source 1..19: mol_type = other RNA
atactttcaatcctcaacc

SEQ ID NO: 3288 - RNA, 19 nt, synthetic construct
  source 1..19: mol_type = other RNA
aatactttcaatcctcaac

SEQ ID NO: 3289 - RNA, 19 nt, synthetic construct
  source 1..19: mol_type = other RNA
aaatactttcaatcctcaa

SEQ ID NO: 3290 - RNA, 19 nt, synthetic construct
  source 1..19: mol_type = other RNA
taaatactttcaatcctca

SEQ ID NO: 3291 - RNA, 19 nt, synthetic construct
  source 1..19: mol_type = other RNA
ataaatactttcaatcctc

SEQ ID NO: 3292 - RNA, 19 nt, synthetic construct
  source 1..19: mol_type = other RNA
gataaatactttcaatcct

SEQ ID NO: 3293 - RNA, 19 nt, synthetic construct
  source 1..19: mol_type = other RNA
cgataaatactttcaatcc

SEQ ID NO: 3294 - RNA, 19 nt, synthetic construct
  source 1..19: mol_type = other RNA
tcgataaatactttcaatc

SEQ ID NO: 3295 - RNA, 19 nt, synthetic construct
  source 1..19: mol_type = other RNA
ctcgataaatactttcaat

SEQ ID NO: 3296 - RNA, 19 nt, synthetic construct
  source 1..19: mol_type = other RNA
actcgataaatactttcaa

SEQ ID NO: 3297 - RNA, 19 nt, synthetic construct
  source 1..19: mol_type = other RNA
cactcgataaatactttca

SEQ ID NO: 3298 - RNA, 19 nt, synthetic construct
  source 1..19: mol_type = other RNA
gcactcgataaatactttc

SEQ ID NO: 3299 - RNA, 19 nt, synthetic construct
  source 1..19: mol_type = other RNA
agcactcgataaatacttt

SEQ ID NO: 3300 - RNA, 19 nt, synthetic construct
  source 1..19: mol_type = other RNA
gagcactcgataaatactt

SEQ ID NO: 3301 - RNA, 19 nt, synthetic construct
  source 1..19: mol_type = other RNA
tgagcactcgataaatact

SEQ ID NO: 3302 - RNA, 19 nt, synthetic construct
  source 1..19: mol_type = other RNA
ttgagcactcgataaatac

SEQ ID NO: 3303 - RNA, 19 nt, synthetic construct
  source 1..19: mol_type = other RNA
attgagcactcgataaata

SEQ ID NO: 3304 - RNA, 19 nt, synthetic construct
  source 1..19: mol_type = other RNA
cattgagcactcgataaat

SEQ ID NO: 3305 - RNA, 19 nt, synthetic construct
  source 1..19: mol_type = other RNA
ccattgagcactcgataaa

SEQ ID NO: 3306 - RNA, 19 nt, synthetic construct
  source 1..19: mol_type = other RNA
accattgagcactcgataa

SEQ ID NO: 3307 - RNA, 19 nt, synthetic construct
  source 1..19: mol_type = other RNA
caccattgagcactcgata

SEQ ID NO: 3308 - RNA, 19 nt, synthetic construct
  source 1..19: mol_type = other RNA
gcaccattgagcactcgat

SEQ ID NO: 3309 - RNA, 19 nt, synthetic construct
  source 1..19: mol_type = other RNA
ggcaccattgagcactcga

SEQ ID NO: 3310 - RNA, 19 nt, synthetic construct
  source 1..19: mol_type = other RNA
gggcaccattgagcactcg

SEQ ID NO: 3311 - RNA, 19 nt, synthetic construct
  source 1..19: mol_type = other RNA
tgggcaccattgagcactc

SEQ ID NO: 3312 - RNA, 19 nt, synthetic construct
  source 1..19: mol_type = other RNA
ctgggcaccattgagcact

SEQ ID NO: 3313 - RNA, 19 nt, synthetic construct
  source 1..19: mol_type = other RNA
cctgggcaccattgagcac

SEQ ID NO: 3314 - RNA, 19 nt, synthetic construct
  source 1..19: mol_type = other RNA
gcctgggcaccattgagca

SEQ ID NO: 3315 - RNA, 19 nt, synthetic construct
  source 1..19: mol_type = other RNA
agcctgggcaccattgagc

SEQ ID NO: 3316 - RNA, 19 nt, synthetic construct
  source 1..19: mol_type = other RNA
cagcctgggcaccattgag

SEQ ID NO: 3317 - RNA, 19 nt, synthetic construct
  source 1..19: mol_type = other RNA
ccagcctgggcaccattga

SEQ ID NO: 3318 - RNA, 19 nt, synthetic construct
  source 1..19: mol_type = other RNA
tccagcctgggcaccattg

SEQ ID NO: 3319 - RNA, 19 nt, synthetic construct
  source 1..19: mol_type = other RNA
ctccagcctgggcaccatt

SEQ ID NO: 3320 - RNA, 19 nt, synthetic construct
  source 1..19: mol_type = other RNA
actccagcctgggcaccat

SEQ ID NO: 3321 - RNA, 19 nt, synthetic construct
  source 1..19: mol_type = other RNA
cactccagcctgggcacca

SEQ ID NO: 3322 - RNA, 19 nt, synthetic construct
  source 1..19: mol_type = other RNA
gcactccagcctgggcacc

SEQ ID NO: 3323 - RNA, 19 nt, synthetic construct
  source 1..19: mol_type = other RNA
tgcactccagcctgggcac

SEQ ID NO: 3324 - RNA, 19 nt, synthetic construct
  source 1..19: mol_type = other RNA
ctgcactccagcctgggca

SEQ ID NO: 3325 - RNA, 19 nt, synthetic construct
  source 1..19: mol_type = other RNA
actgcactccagcctgggc

SEQ ID NO: 3326 - RNA, 19 nt, synthetic construct
  source 1..19: mol_type = other RNA
cactgcactccagcctggg

SEQ ID NO: 3327 - RNA, 19 nt, synthetic construct
  source 1..19: mol_type = other RNA
ccactgcactccagcctgg

SEQ ID NO: 3328 - RNA, 19 nt, synthetic construct
  source 1..19: mol_type = other RNA
gccactgcactccagcctg

SEQ ID NO: 3329 - RNA, 19 nt, synthetic construct
  source 1..19: mol_type = other RNA
cgccactgcactccagcct

SEQ ID NO: 3330 - RNA, 19 nt, synthetic construct
  source 1..19: mol_type = other RNA
acgccactgcactccagcc

SEQ ID NO: 3331 - RNA, 19 nt, synthetic construct
  source 1..19: mol_type = other RNA
cacgccactgcactccagc

SEQ ID NO: 3332 - RNA, 19 nt, synthetic construct
  source 1..19: mol_type = other RNA
tcacgccactgcactccag

SEQ ID NO: 3333 - RNA, 19 nt, synthetic construct
  source 1..19: mol_type = other RNA
atcacgccactgcactcca

SEQ ID NO: 3334 - RNA, 19 nt, synthetic construct
  source 1..19: mol_type = other RNA
gatcacgccactgcactcc

SEQ ID NO: 3335 - RNA, 19 nt, synthetic construct
  source 1..19: mol_type = other RNA
agatcacgccactgcactc

SEQ ID NO: 3336 - RNA, 19 nt, synthetic construct
  source 1..19: mol_type = other RNA
gagatcacgccactgcact

SEQ ID NO: 3337 - RNA, 19 nt, synthetic construct
  source 1..19: mol_type = other RNA
cgagatcacgccactgcac

SEQ ID NO: 3338 - RNA, 19 nt, synthetic construct
  source 1..19: mol_type = other RNA
ccgagatcacgccactgca

SEQ ID NO: 3339 - RNA, 19 nt, synthetic construct
  source 1..19: mol_type = other RNA
gccgagatcacgccactgc

SEQ ID NO: 3340 - RNA, 19 nt, synthetic construct
  source 1..19: mol_type = other RNA
agccgagatcacgccactg

SEQ ID NO: 3341 - RNA, 19 nt, synthetic construct
  source 1..19: mol_type = other RNA
gagccgagatcacgccact

SEQ ID NO: 3342 - RNA, 19 nt, synthetic construct
  source 1..19: mol_type = other RNA
ggagccgagatcacgccac

SEQ ID NO: 3343 - RNA, 19 nt, synthetic construct
  source 1..19: mol_type = other RNA
gggagccgagatcacgcca

SEQ ID NO: 3344 - RNA, 19 nt, synthetic construct
  source 1..19: mol_type = other RNA
agggagccgagatcacgcc

SEQ ID NO: 3345 - RNA, 19 nt, synthetic construct
  source 1..19: mol_type = other RNA
tagggagccgagatcacgc

SEQ ID NO: 3346 - RNA, 19 nt, synthetic construct
  source 1..19: mol_type = other RNA
gtagggagccgagatcacg

SEQ ID NO: 3347 - RNA, 19 nt, synthetic construct
  source 1..19: mol_type = other RNA
tgtagggagccgagatcac

SEQ ID NO: 3348 - RNA, 19 nt, synthetic construct
  source 1..19: mol_type = other RNA
ttgtagggagccgagatca

SEQ ID NO: 3349 - RNA, 19 nt, synthetic construct
  source 1..19: mol_type = other RNA
gttgtagggagccgagatc

SEQ ID NO: 3350 - RNA, 19 nt, synthetic construct
  source 1..19: mol_type = other RNA
ggttgtagggagccgagat

SEQ ID NO: 3351 - RNA, 19 nt, synthetic construct
  source 1..19: mol_type = other RNA
aggttgtagggagccgaga

SEQ ID NO: 3352 - RNA, 19 nt, synthetic construct
  source 1..19: mol_type = other RNA
gaggttgtagggagccgag

SEQ ID NO: 3353 - RNA, 19 nt, synthetic construct
  source 1..19: mol_type = other RNA
ggaggttgtagggagccga

SEQ ID NO: 3354 - RNA, 19 nt, synthetic construct
  source 1..19: mol_type = other RNA
tggaggttgtagggagccg

SEQ ID NO: 3355 - RNA, 19 nt, synthetic construct
  source 1..19: mol_type = other RNA
gtggaggttgtagggagcc

SEQ ID NO: 3356 - RNA, 19 nt, synthetic construct
  source 1..19: mol_type = other RNA
ggtggaggttgtagggagc

SEQ ID NO: 3357 - RNA, 19 nt, synthetic construct
  source 1..19: mol_type = other RNA
aggtggaggttgtagggag

SEQ ID NO: 3358 - RNA, 19 nt, synthetic construct
  source 1..19: mol_type = other RNA
gaggtggaggttgtaggga

SEQ ID NO: 3359 - RNA, 19 nt, synthetic construct
  source 1..19: mol_type = other RNA
ggaggtggaggttgtaggg

SEQ ID NO: 3360 - RNA, 19 nt, synthetic construct
  source 1..19: mol_type = other RNA
gggaggtggaggttgtagg

SEQ ID NO: 3361 - RNA, 19 nt, synthetic construct
  source 1..19: mol_type = other RNA
tgggaggtggaggttgtag

SEQ ID NO: 3362 - RNA, 19 nt, synthetic construct
  source 1..19: mol_type = other RNA
ctgggaggtggaggttgta

SEQ ID NO: 3363 - RNA, 19 nt, synthetic construct
  source 1..19: mol_type = other RNA
gctgggaggtggaggttgt

SEQ ID NO: 3364 - RNA, 19 nt, synthetic construct
  source 1..19: mol_type = other RNA
ggctgggaggtggaggttg

SEQ ID NO: 3365 - RNA, 19 nt, synthetic construct
  source 1..19: mol_type = other RNA
cggctgggaggtggaggtt

SEQ ID NO: 3366 - RNA, 19 nt, synthetic construct
  source 1..19: mol_type = other RNA
gcggctgggaggtggaggt

SEQ ID NO: 3367 - RNA, 19 nt, synthetic construct
  source 1..19: mol_type = other RNA
ggcggctgggaggtggagg

SEQ ID NO: 3368 - RNA, 19 nt, synthetic construct
  source 1..19: mol_type = other RNA
aggcggctgggaggtggag

SEQ ID NO: 3369 - RNA, 19 nt, synthetic construct
  source 1..19: mol_type = other RNA
caggcggctgggaggtgga

SEQ ID NO: 3370 - RNA, 19 nt, synthetic construct
  source 1..19: mol_type = other RNA
gcaggcggctgggaggtgg

SEQ ID NO: 3371 - RNA, 19 nt, synthetic construct
  source 1..19: mol_type = other RNA
ggcaggcggctgggaggtg

SEQ ID NO: 3372 - RNA, 19 nt, synthetic construct
  source 1..19: mol_type = other RNA
aggcaggcggctgggaggt

SEQ ID NO: 3373 - RNA, 19 nt, synthetic construct
  source 1..19: mol_type = other RNA
aaggcaggcggctgggagg

SEQ ID NO: 3374 - RNA, 19 nt, synthetic construct
  source 1..19: mol_type = other RNA
caaggcaggcggctgggag

SEQ ID NO: 3375 - RNA, 19 nt, synthetic construct
  source 1..19: mol_type = other RNA
ccaaggcaggcggctggga

SEQ ID NO: 3376 - RNA, 19 nt, synthetic construct
  source 1..19: mol_type = other RNA
gccaaggcaggcggctggg

SEQ ID NO: 3377 - RNA, 19 nt, synthetic construct
  source 1..19: mol_type = other RNA
ggccaaggcaggcggctgg

SEQ ID NO: 3378 - RNA, 19 nt, synthetic construct
  source 1..19: mol_type = other RNA
aggccaaggcaggcggctg

SEQ ID NO: 3379 - RNA, 19 nt, synthetic construct
  source 1..19: mol_type = other RNA
gaggccaaggcaggcggct

SEQ ID NO: 3380 - RNA, 19 nt, synthetic construct
  source 1..19: mol_type = other RNA
ggaggccaaggcaggcggc

SEQ ID NO: 3381 - RNA, 19 nt, synthetic construct
  source 1..19: mol_type = other RNA
gggaggccaaggcaggcgg

SEQ ID NO: 3382 - RNA, 19 nt, synthetic construct
  source 1..19: mol_type = other RNA
tgggaggccaaggcaggcg

SEQ ID NO: 3383 - RNA, 19 nt, synthetic construct
  source 1..19: mol_type = other RNA
ttgggaggccaaggcaggc

SEQ ID NO: 3384 - RNA, 19 nt, synthetic construct
  source 1..19: mol_type = other RNA
tttgggaggccaaggcagg

SEQ ID NO: 3385 - RNA, 19 nt, synthetic construct
  source 1..19: mol_type = other RNA
ctttgggaggccaaggcag

SEQ ID NO: 3386 - RNA, 19 nt, synthetic construct
  source 1..19: mol_type = other RNA
actttgggaggccaaggca

SEQ ID NO: 3387 - RNA, 19 nt, synthetic construct
  source 1..19: mol_type = other RNA
cactttgggaggccaaggc

SEQ ID NO: 3388 - RNA, 19 nt, synthetic construct
  source 1..19: mol_type = other RNA
gcactttgggaggccaagg

SEQ ID NO: 3389 - RNA, 19 nt, synthetic construct
  source 1..19: mol_type = other RNA
ggcactttgggaggccaag

SEQ ID NO: 3390 - RNA, 19 nt, synthetic construct
  source 1..19: mol_type = other RNA
cggcactttgggaggccaa

SEQ ID NO: 3391 - RNA, 19 nt, synthetic construct
  source 1..19: mol_type = other RNA
tcggcactttgggaggcca

SEQ ID NO: 3392 - RNA, 19 nt, synthetic construct
  source 1..19: mol_type = other RNA
ctcggcactttgggaggcc

SEQ ID NO: 3393 - RNA, 19 nt, synthetic construct
  source 1..19: mol_type = other RNA
tctcggcactttgggaggc

SEQ ID NO: 3394 - RNA, 19 nt, synthetic construct
  source 1..19: mol_type = other RNA
ctctcggcactttgggagg

SEQ ID NO: 3395 - RNA, 19 nt, synthetic construct
  source 1..19: mol_type = other RNA
actctcggcactttgggag

SEQ ID NO: 3396 - RNA, 19 nt, synthetic construct
  source 1..19: mol_type = other RNA
cactctcggcactttggga

SEQ ID NO: 3397 - RNA, 19 nt, synthetic construct
  source 1..19: mol_type = other RNA
gcactctcggcactttggg

SEQ ID NO: 3398 - RNA, 19 nt, synthetic construct
  source 1..19: mol_type = other RNA
tgcactctcggcactttgg

SEQ ID NO: 3399 - RNA, 19 nt, synthetic construct
  source 1..19: mol_type = other RNA
ctgcactctcggcactttg

SEQ ID NO: 3400 - RNA, 19 nt, synthetic construct
  source 1..19: mol_type = other RNA
gctgcactctcggcacttt

SEQ ID NO: 3401 - RNA, 19 nt, synthetic construct
  source 1..19: mol_type = other RNA
ggctgcactctcggcactt

SEQ ID NO: 3402 - RNA, 19 nt, synthetic construct
  source 1..19: mol_type = other RNA
aggctgcactctcggcact

SEQ ID NO: 3403 - RNA, 19 nt, synthetic construct
  source 1..19: mol_type = other RNA
gaggctgcactctcggcac

SEQ ID NO: 3404 - RNA, 19 nt, synthetic construct
  source 1..19: mol_type = other RNA
agaggctgcactctcggca

SEQ ID NO: 3405 - RNA, 19 nt, synthetic construct
  source 1..19: mol_type = other RNA
cagaggctgcactctcggc

SEQ ID NO: 3406 - RNA, 19 nt, synthetic construct
  source 1..19: mol_type = other RNA
gcagaggctgcactctcgg

SEQ ID NO: 3407 - RNA, 19 nt, synthetic construct
  source 1..19: mol_type = other RNA
ggcagaggctgcactctcg

SEQ ID NO: 3408 - RNA, 19 nt, synthetic construct
  source 1..19: mol_type = other RNA
gggcagaggctgcactctc

SEQ ID NO: 3409 - RNA, 19 nt, synthetic construct
  source 1..19: mol_type = other RNA
cgggcagaggctgcactct

SEQ ID NO: 3410 - RNA, 19 nt, synthetic construct
  source 1..19: mol_type = other RNA
ccgggcagaggctgcactc

SEQ ID NO: 3411 - RNA, 19 nt, synthetic construct
  source 1..19: mol_type = other RNA
gccgggcagaggctgcact

SEQ ID NO: 3412 - RNA, 19 nt, synthetic construct
  source 1..19: mol_type = other RNA
ggccgggcagaggctgcac

SEQ ID NO: 3413 - RNA, 19 nt, synthetic construct
  source 1..19: mol_type = other RNA
cggccgggcagaggctgca

SEQ ID NO: 3414 - RNA, 19 nt, synthetic construct
  source 1..19: mol_type = other RNA
gcggccgggcagaggctgc

SEQ ID NO: 3415 - RNA, 19 nt, synthetic construct
  source 1..19: mol_type = other RNA
ggcggccgggcagaggctg

SEQ ID NO: 3416 - RNA, 19 nt, synthetic construct
  source 1..19: mol_type = other RNA
tggcggccgggcagaggct

SEQ ID NO: 3417 - RNA, 19 nt, synthetic construct
  source 1..19: mol_type = other RNA
gtggcggccgggcagaggc

SEQ ID NO: 3418 - RNA, 19 nt, synthetic construct
  source 1..19: mol_type = other RNA
ggtggcggccgggcagagg

SEQ ID NO: 3419 - RNA, 19 nt, synthetic construct
  source 1..19: mol_type = other RNA
gggtggcggccgggcagag

SEQ ID NO: 3420 - RNA, 19 nt, synthetic construct
  source 1..19: mol_type = other RNA
ggggtggcggccgggcaga

SEQ ID NO: 3421 - RNA, 19 nt, synthetic construct
  source 1..19: mol_type = other RNA
cggggtggcggccgggcag

SEQ ID NO: 3422 - RNA, 19 nt, synthetic construct
  source 1..19: mol_type = other RNA
acggggtggcggccgggca

SEQ ID NO: 3423 - RNA, 19 nt, synthetic construct
  source 1..19: mol_type = other RNA
gacggggtggcggccgggc

SEQ ID NO: 3424 - RNA, 19 nt, synthetic construct
  source 1..19: mol_type = other RNA
agacggggtggcggccggg

SEQ ID NO: 3425 - RNA, 19 nt, synthetic construct
  source 1..19: mol_type = other RNA
cagacggggtggcggccgg

SEQ ID NO: 3426 - RNA, 19 nt, synthetic construct
  source 1..19: mol_type = other RNA
ccagacggggtggcggccg

SEQ ID NO: 3427 - RNA, 19 nt, synthetic construct
  source 1..19: mol_type = other RNA
cccagacggggtggcggcc

SEQ ID NO: 3428 - RNA, 19 nt, synthetic construct
  source 1..19: mol_type = other RNA
tcccagacggggtggcggc

SEQ ID NO: 3429 - RNA, 19 nt, synthetic construct
  source 1..19: mol_type = other RNA
ttcccagacggggtggcgg

SEQ ID NO: 3430 - RNA, 19 nt, synthetic construct
  source 1..19: mol_type = other RNA
cttcccagacggggtggcg

SEQ ID NO: 3431 - RNA, 19 nt, synthetic construct
  source 1..19: mol_type = other RNA
acttcccagacggggtggc

SEQ ID NO: 3432 - RNA, 19 nt, synthetic construct
  source 1..19: mol_type = other RNA
cacttcccagacggggtgg

SEQ ID NO: 3433 - RNA, 19 nt, synthetic construct
  source 1..19: mol_type = other RNA
tcacttcccagacggggtg

SEQ ID NO: 3434 - RNA, 19 nt, synthetic construct
  source 1..19: mol_type = other RNA
ctcacttcccagacggggt

SEQ ID NO: 3435 - RNA, 19 nt, synthetic construct
  source 1..19: mol_type = other RNA
cctcacttcccagacgggg

SEQ ID NO: 3436 - RNA, 19 nt, synthetic construct
  source 1..19: mol_type = other RNA
tcctcacttcccagacggg

SEQ ID NO: 3437 - RNA, 19 nt, synthetic construct
  source 1..19: mol_type = other RNA
ctcctcacttcccagacgg

SEQ ID NO: 3438 - RNA, 19 nt, synthetic construct
  source 1..19: mol_type = other RNA
gctcctcacttcccagacg

SEQ ID NO: 3439 - RNA, 19 nt, synthetic construct
  source 1..19: mol_type = other RNA
cgctcctcacttcccagac

SEQ ID NO: 3440 - RNA, 19 nt, synthetic construct
  source 1..19: mol_type = other RNA
acgctcctcacttcccaga

SEQ ID NO: 3441 - RNA, 19 nt, synthetic construct
  source 1..19: mol_type = other RNA
gacgctcctcacttcccag

SEQ ID NO: 3442 - RNA, 19 nt, synthetic construct
  source 1..19: mol_type = other RNA
agacgctcctcacttccca

SEQ ID NO: 3443 - RNA, 19 nt, synthetic construct
  source 1..19: mol_type = other RNA
gagacgctcctcacttccc

SEQ ID NO: 3444 - RNA, 19 nt, synthetic construct
  source 1..19: mol_type = other RNA
agagacgctcctcacttcc

SEQ ID NO: 3445 - RNA, 19 nt, synthetic construct
  source 1..19: mol_type = other RNA
cagagacgctcctcacttc

SEQ ID NO: 3446 - RNA, 19 nt, synthetic construct
  source 1..19: mol_type = other RNA
gcagagacgctcctcactt

SEQ ID NO: 3447 - RNA, 19 nt, synthetic construct
  source 1..19: mol_type = other RNA
ggcagagacgctcctcact

SEQ ID NO: 3448 - RNA, 19 nt, synthetic construct
  source 1..19: mol_type = other RNA
aggcagagacgctcctcac

SEQ ID NO: 3449 - RNA, 19 nt, synthetic construct
  source 1..19: mol_type = other RNA
caggcagagacgctcctca

SEQ ID NO: 3450 - RNA, 19 nt, synthetic construct
  source 1..19: mol_type = other RNA
ccaggcagagacgctcctc

SEQ ID NO: 3451 - RNA, 19 nt, synthetic construct
  source 1..19: mol_type = other RNA
gccaggcagagacgctcct

SEQ ID NO: 3452 - RNA, 19 nt, synthetic construct
  source 1..19: mol_type = other RNA
ggccaggcagagacgctcc

SEQ ID NO: 3453 - RNA, 19 nt, synthetic construct
  source 1..19: mol_type = other RNA
cggccaggcagagacgctc

SEQ ID NO: 3454 - RNA, 19 nt, synthetic construct
  source 1..19: mol_type = other RNA
gcggccaggcagagacgct

SEQ ID NO: 3455 - RNA, 19 nt, synthetic construct
  source 1..19: mol_type = other RNA
ggcggccaggcagagacgc

SEQ ID NO: 3456 - RNA, 19 nt, synthetic construct
  source 1..19: mol_type = other RNA
aggcggccaggcagagacg

SEQ ID NO: 3457 - RNA, 19 nt, synthetic construct
  source 1..19: mol_type = other RNA
taggcggccaggcagagac

SEQ ID NO: 3458 - RNA, 19 nt, synthetic construct
  source 1..19: mol_type = other RNA
ataggcggccaggcagaga

SEQ ID NO: 3459 - RNA, 19 nt, synthetic construct
  source 1..19: mol_type = other RNA
gataggcggccaggcagag

SEQ ID NO: 3460 - RNA, 19 nt, synthetic construct
  source 1..19: mol_type = other RNA
cgataggcggccaggcaga

SEQ ID NO: 3461 - RNA, 19 nt, synthetic construct
  source 1..19: mol_type = other RNA
acgataggcggccaggcag

SEQ ID NO: 3462 - RNA, 19 nt, synthetic construct
  source 1..19: mol_type = other RNA
gacgataggcggccaggca

SEQ ID NO: 3463 - RNA, 19 nt, synthetic construct
  source 1..19: mol_type = other RNA
agacgataggcggccaggc

SEQ ID NO: 3464 - RNA, 19 nt, synthetic construct
  source 1..19: mol_type = other RNA
cagacgataggcggccagg

SEQ ID NO: 3465 - RNA, 19 nt, synthetic construct
  source 1..19: mol_type = other RNA
ccagacgataggcggccag

SEQ ID NO: 3466 - RNA, 19 nt, synthetic construct
  source 1..19: mol_type = other RNA
cccagacgataggcggcca

SEQ ID NO: 3467 - RNA, 19 nt, synthetic construct
  source 1..19: mol_type = other RNA
tcccagacgataggcggcc

SEQ ID NO: 3468 - RNA, 19 nt, synthetic construct
  source 1..19: mol_type = other RNA
gtcccagacgataggcggc

SEQ ID NO: 3469 - RNA, 19 nt, synthetic construct
  source 1..19: mol_type = other RNA
cgtcccagacgataggcgg

SEQ ID NO: 3470 - RNA, 19 nt, synthetic construct
  source 1..19: mol_type = other RNA
acgtcccagacgataggcg

SEQ ID NO: 3471 - RNA, 19 nt, synthetic construct
  source 1..19: mol_type = other RNA
cacgtcccagacgataggc

SEQ ID NO: 3472 - RNA, 19 nt, synthetic construct
  source 1..19: mol_type = other RNA
tcacgtcccagacgatagg

SEQ ID NO: 3473 - RNA, 19 nt, synthetic construct
  source 1..19: mol_type = other RNA
ctcacgtcccagacgatag

SEQ ID NO: 3474 - RNA, 19 nt, synthetic construct
  source 1..19: mol_type = other RNA
cctcacgtcccagacgata

SEQ ID NO: 3475 - RNA, 19 nt, synthetic construct
  source 1..19: mol_type = other RNA
tcctcacgtcccagacgat

SEQ ID NO: 3476 - RNA, 19 nt, synthetic construct
  source 1..19: mol_type = other RNA
ctcctcacgtcccagacga

SEQ ID NO: 3477 - RNA, 19 nt, synthetic construct
  source 1..19: mol_type = other RNA
gctcctcacgtcccagacg

SEQ ID NO: 3478 - RNA, 19 nt, synthetic construct
  source 1..19: mol_type = other RNA
ggctcctcacgtcccagac

SEQ ID NO: 3479 - RNA, 19 nt, synthetic construct
  source 1..19: mol_type = other RNA
gggctcctcacgtcccaga

SEQ ID NO: 3480 - RNA, 19 nt, synthetic construct
  source 1..19: mol_type = other RNA
ggggctcctcacgtcccag

SEQ ID NO: 3481 - RNA, 19 nt, synthetic construct
  source 1..19: mol_type = other RNA
aggggctcctcacgtccca

SEQ ID NO: 3482 - RNA, 19 nt, synthetic construct
  source 1..19: mol_type = other RNA
gaggggctcctcacgtccc

SEQ ID NO: 3483 - RNA, 19 nt, synthetic construct
  source 1..19: mol_type = other RNA
agaggggctcctcacgtcc

SEQ ID NO: 3484 - RNA, 19 nt, synthetic construct
  source 1..19: mol_type = other RNA
cagaggggctcctcacgtc

SEQ ID NO: 3485 - RNA, 19 nt, synthetic construct
  source 1..19: mol_type = other RNA
gcagaggggctcctcacgt

SEQ ID NO: 3486 - RNA, 19 nt, synthetic construct
  source 1..19: mol_type = other RNA
ggcagaggggctcctcacg

SEQ ID NO: 3487 - RNA, 19 nt, synthetic construct
  source 1..19: mol_type = other RNA
aggcagaggggctcctcac

SEQ ID NO: 3488 - RNA, 19 nt, synthetic construct
  source 1..19: mol_type = other RNA
caggcagaggggctcctca

SEQ ID NO: 3489 - RNA, 19 nt, synthetic construct
  source 1..19: mol_type = other RNA
ccaggcagaggggctcctc

SEQ ID NO: 3490 - RNA, 19 nt, synthetic construct
  source 1..19: mol_type = other RNA
gccaggcagaggggctcct

SEQ ID NO: 3491 - RNA, 19 nt, synthetic construct
  source 1..19: mol_type = other RNA
agccaggcagaggggctcc

SEQ ID NO: 3492 - RNA, 19 nt, synthetic construct
  source 1..19: mol_type = other RNA
cagccaggcagaggggctc

SEQ ID NO: 3493 - RNA, 19 nt, synthetic construct
  source 1..19: mol_type = other RNA
gcagccaggcagaggggct

SEQ ID NO: 3494 - RNA, 19 nt, synthetic construct
  source 1..19: mol_type = other RNA
ggcagccaggcagaggggc

SEQ ID NO: 3495 - RNA, 19 nt, synthetic construct
  source 1..19: mol_type = other RNA
gggcagccaggcagagggg

SEQ ID NO: 3496 - RNA, 19 nt, synthetic construct
  source 1..19: mol_type = other RNA
tgggcagccaggcagaggg

SEQ ID NO: 3497 - RNA, 19 nt, synthetic construct
  source 1..19: mol_type = other RNA
ctgggcagccaggcagagg

SEQ ID NO: 3498 - RNA, 19 nt, synthetic construct
  source 1..19: mol_type = other RNA
actgggcagccaggcagag

SEQ ID NO: 3499 - RNA, 19 nt, synthetic construct
  source 1..19: mol_type = other RNA
gactgggcagccaggcaga

SEQ ID NO: 3500 - RNA, 19 nt, synthetic construct
  source 1..19: mol_type = other RNA
agactgggcagccaggcag

SEQ ID NO: 3501 - RNA, 19 nt, synthetic construct
  source 1..19: mol_type = other RNA
cagactgggcagccaggca

SEQ ID NO: 3502 - RNA, 19 nt, synthetic construct
  source 1..19: mol_type = other RNA
ccagactgggcagccaggc

SEQ ID NO: 3503 - RNA, 19 nt, synthetic construct
  source 1..19: mol_type = other RNA
tccagactgggcagccagg

SEQ ID NO: 3504 - RNA, 19 nt, synthetic construct
  source 1..19: mol_type = other RNA
ttccagactgggcagccag

SEQ ID NO: 3505 - RNA, 19 nt, synthetic construct
  source 1..19: mol_type = other RNA
tttccagactgggcagcca

SEQ ID NO: 3506 - RNA, 19 nt, synthetic construct
  source 1..19: mol_type = other RNA
ctttccagactgggcagcc

SEQ ID NO: 3507 - RNA, 19 nt, synthetic construct
  source 1..19: mol_type = other RNA
actttccagactgggcagc

SEQ ID NO: 3508 - RNA, 19 nt, synthetic construct
  source 1..19: mol_type = other RNA
cactttccagactgggcag

SEQ ID NO: 3509 - RNA, 19 nt, synthetic construct
  source 1..19: mol_type = other RNA
tcactttccagactgggca

SEQ ID NO: 3510 - RNA, 19 nt, synthetic construct
  source 1..19: mol_type = other RNA
ctcactttccagactgggc

SEQ ID NO: 3511 - RNA, 19 nt, synthetic construct
  source 1..19: mol_type = other RNA
cctcactttccagactggg

SEQ ID NO: 3512 - RNA, 19 nt, synthetic construct
  source 1..19: mol_type = other RNA
tcctcactttccagactgg

SEQ ID NO: 3513 - RNA, 19 nt, synthetic construct
  source 1..19: mol_type = other RNA
ctcctcactttccagactg

SEQ ID NO: 3514 - RNA, 19 nt, synthetic construct
  source 1..19: mol_type = other RNA
gctcctcactttccagact

SEQ ID NO: 3515 - RNA, 19 nt, synthetic construct
  source 1..19: mol_type = other RNA
cgctcctcactttccagac

SEQ ID NO: 3516 - RNA, 19 nt, synthetic construct
  source 1..19: mol_type = other RNA
acgctcctcactttccaga

SEQ ID NO: 3517 - RNA, 19 nt, synthetic construct
  source 1..19: mol_type = other RNA
gacgctcctcactttccag

SEQ ID NO: 3518 - RNA, 19 nt, synthetic construct
  source 1..19: mol_type = other RNA
agacgctcctcactttcca

SEQ ID NO: 3519 - RNA, 19 nt, synthetic construct
  source 1..19: mol_type = other RNA
gagacgctcctcactttcc

SEQ ID NO: 3520 - RNA, 19 nt, synthetic construct
  source 1..19: mol_type = other RNA
agagacgctcctcactttc

SEQ ID NO: 3521 - RNA, 19 nt, synthetic construct
  source 1..19: mol_type = other RNA
cagagacgctcctcacttt

SEQ ID NO: 3522 - RNA, 19 nt, synthetic construct
  source 1..19: mol_type = other RNA
gcagagacgctcctcactt

SEQ ID NO: 3523 - RNA, 19 nt, synthetic construct
  source 1..19: mol_type = other RNA
ggcagagacgctcctcact

SEQ ID NO: 3524 - RNA, 19 nt, synthetic construct
  source 1..19: mol_type = other RNA
gggcagagacgctcctcac

SEQ ID NO: 3525 - RNA, 19 nt, synthetic construct
  source 1..19: mol_type = other RNA
cgggcagagacgctcctca

SEQ ID NO: 3526 - RNA, 19 nt, synthetic construct
  source 1..19: mol_type = other RNA
ccgggcagagacgctcctc

SEQ ID NO: 3527 - RNA, 19 nt, synthetic construct
  source 1..19: mol_type = other RNA
gccgggcagagacgctcct

SEQ ID NO: 3528 - RNA, 19 nt, synthetic construct
  source 1..19: mol_type = other RNA
agccgggcagagacgctcc

SEQ ID NO: 3529 - RNA, 19 nt, synthetic construct
  source 1..19: mol_type = other RNA
cagccgggcagagacgctc

SEQ ID NO: 3530 - RNA, 19 nt, synthetic construct
  source 1..19: mol_type = other RNA
gcagccgggcagagacgct

SEQ ID NO: 3531 - RNA, 19 nt, synthetic construct
  source 1..19: mol_type = other RNA
ggcagccgggcagagacgc

SEQ ID NO: 3532 - RNA, 19 nt, synthetic construct
  source 1..19: mol_type = other RNA
tggcagccgggcagagacg

SEQ ID NO: 3533 - RNA, 19 nt, synthetic construct
  source 1..19: mol_type = other RNA
atggcagccgggcagagac

SEQ ID NO: 3534 - RNA, 19 nt, synthetic construct
  source 1..19: mol_type = other RNA
gatggcagccgggcagaga

SEQ ID NO: 3535 - RNA, 19 nt, synthetic construct
  source 1..19: mol_type = other RNA
ggatggcagccgggcagag

SEQ ID NO: 3536 - RNA, 19 nt, synthetic construct
  source 1..19: mol_type = other RNA
gggatggcagccgggcaga

SEQ ID NO: 3537 - RNA, 19 nt, synthetic construct
  source 1..19: mol_type = other RNA
tgggatggcagccgggcag

SEQ ID NO: 3538 - RNA, 19 nt, synthetic construct
  source 1..19: mol_type = other RNA
atgggatggcagccgggca

SEQ ID NO: 3539 - RNA, 19 nt, synthetic construct
  source 1..19: mol_type = other RNA
gatgggatggcagccgggc

SEQ ID NO: 3540 - RNA, 19 nt, synthetic construct
  source 1..19: mol_type = other RNA
agatgggatggcagccggg

SEQ ID NO: 3541 - RNA, 19 nt, synthetic construct
  source 1..19: mol_type = other RNA
tagatgggatggcagccgg

SEQ ID NO: 3542 - RNA, 19 nt, synthetic construct
  source 1..19: mol_type = other RNA
ctagatgggatggcagccg

SEQ ID NO: 3543 - RNA, 19 nt, synthetic construct
  source 1..19: mol_type = other RNA
cctagatgggatggcagcc

SEQ ID NO: 3544 - RNA, 19 nt, synthetic construct
  source 1..19: mol_type = other RNA
tcctagatgggatggcagc

SEQ ID NO: 3545 - RNA, 19 nt, synthetic construct
  source 1..19: mol_type = other RNA
ttcctagatgggatggcag

SEQ ID NO: 3546 - RNA, 19 nt, synthetic construct
  source 1..19: mol_type = other RNA
cttcctagatgggatggca

SEQ ID NO: 3547 - RNA, 19 nt, synthetic construct
  source 1..19: mol_type = other RNA
acttcctagatgggatggc

SEQ ID NO: 3548 - RNA, 19 nt, synthetic construct
  source 1..19: mol_type = other RNA
cacttcctagatgggatgg

SEQ ID NO: 3549 - RNA, 19 nt, synthetic construct
  source 1..19: mol_type = other RNA
ccacttcctagatgggatg

SEQ ID NO: 3550 - RNA, 19 nt, synthetic construct
  source 1..19: mol_type = other RNA
cccacttcctagatgggat

SEQ ID NO: 3551 - RNA, 19 nt, synthetic construct
  source 1..19: mol_type = other RNA
ccccacttcctagatggga

SEQ ID NO: 3552 - RNA, 19 nt, synthetic construct
  source 1..19: mol_type = other RNA
tccccacttcctagatggg

SEQ ID NO: 3553 - RNA, 19 nt, synthetic construct
  source 1..19: mol_type = other RNA
ctccccacttcctagatgg

SEQ ID NO: 3554 - RNA, 19 nt, synthetic construct
  source 1..19: mol_type = other RNA
gctccccacttcctagatg

SEQ ID NO: 3555 - RNA, 19 nt, synthetic construct
  source 1..19: mol_type = other RNA
cgctccccacttcctagat

SEQ ID NO: 3556 - RNA, 19 nt, synthetic construct
  source 1..19: mol_type = other RNA
gcgctccccacttcctaga

SEQ ID NO: 3557 - RNA, 19 nt, synthetic construct
  source 1..19: mol_type = other RNA
ggcgctccccacttcctag

SEQ ID NO: 3558 - RNA, 19 nt, synthetic construct
  source 1..19: mol_type = other RNA
aggcgctccccacttccta

SEQ ID NO: 3559 - RNA, 19 nt, synthetic construct
  source 1..19: mol_type = other RNA
gaggcgctccccacttcct

SEQ ID NO: 3560 - RNA, 19 nt, synthetic construct
  source 1..19: mol_type = other RNA
agaggcgctccccacttcc

SEQ ID NO: 3561 - RNA, 19 nt, synthetic construct
  source 1..19: mol_type = other RNA
aagaggcgctccccacttc

SEQ ID NO: 3562 - RNA, 19 nt, synthetic construct
  source 1..19: mol_type = other RNA
gaagaggcgctccccactt

SEQ ID NO: 3563 - RNA, 19 nt, synthetic construct
  source 1..19: mol_type = other RNA
ggaagaggcgctccccact

SEQ ID NO: 3564 - RNA, 19 nt, synthetic construct
  source 1..19: mol_type = other RNA
gggaagaggcgctccccac

SEQ ID NO: 3565 - RNA, 19 nt, synthetic construct
  source 1..19: mol_type = other RNA
cgggaagaggcgctcccca

SEQ ID NO: 3566 - RNA, 19 nt, synthetic construct
  source 1..19: mol_type = other RNA
ccgggaagaggcgctcccc

SEQ ID NO: 3567 - RNA, 19 nt, synthetic construct
  source 1..19: mol_type = other RNA
gccgggaagaggcgctccc

SEQ ID NO: 3568 - RNA, 19 nt, synthetic construct
  source 1..19: mol_type = other RNA
ggccgggaagaggcgctcc

SEQ ID NO: 3569 - RNA, 19 nt, synthetic construct
  source 1..19: mol_type = other RNA
tggccgggaagaggcgctc

SEQ ID NO: 3570 - RNA, 19 nt, synthetic construct
  source 1..19: mol_type = other RNA
gtggccgggaagaggcgct

SEQ ID NO: 3571 - RNA, 19 nt, synthetic construct
  source 1..19: mol_type = other RNA
ggtggccgggaagaggcgc

SEQ ID NO: 3572 - RNA, 19 nt, synthetic construct
  source 1..19: mol_type = other RNA
tggtggccgggaagaggcg

SEQ ID NO: 3573 - RNA, 19 nt, synthetic construct
  source 1..19: mol_type = other RNA
atggtggccgggaagaggc

SEQ ID NO: 3574 - RNA, 19 nt, synthetic construct
  source 1..19: mol_type = other RNA
gatggtggccgggaagagg

SEQ ID NO: 3575 - RNA, 19 nt, synthetic construct
  source 1..19: mol_type = other RNA
ggatggtggccgggaagag

SEQ ID NO: 3576 - RNA, 19 nt, synthetic construct
  source 1..19: mol_type = other RNA
gggatggtggccgggaaga

SEQ ID NO: 3577 - RNA, 19 nt, synthetic construct
  source 1..19: mol_type = other RNA
tgggatggtggccgggaag

SEQ ID NO: 3578 - RNA, 19 nt, synthetic construct
  source 1..19: mol_type = other RNA
atgggatggtggccgggaa

SEQ ID NO: 3579 - RNA, 19 nt, synthetic construct
  source 1..19: mol_type = other RNA
gatgggatggtggccggga

SEQ ID NO: 3580 - RNA, 19 nt, synthetic construct
  source 1..19: mol_type = other RNA
agatgggatggtggccggg

SEQ ID NO: 3581 - RNA, 19 nt, synthetic construct
  source 1..19: mol_type = other RNA
cagatgggatggtggccgg

SEQ ID NO: 3582 - RNA, 19 nt, synthetic construct
  source 1..19: mol_type = other RNA
ccagatgggatggtggccg

SEQ ID NO: 3583 - RNA, 19 nt, synthetic construct
  source 1..19: mol_type = other RNA
cccagatgggatggtggcc

SEQ ID NO: 3584 - RNA, 19 nt, synthetic construct
  source 1..19: mol_type = other RNA
tcccagatgggatggtggc

SEQ ID NO: 3585 - RNA, 19 nt, synthetic construct
  source 1..19: mol_type = other RNA
ctcccagatgggatggtgg

SEQ ID NO: 3586 - RNA, 19 nt, synthetic construct
  source 1..19: mol_type = other RNA
cctcccagatgggatggtg

SEQ ID NO: 3587 - RNA, 19 nt, synthetic construct
  source 1..19: mol_type = other RNA
acctcccagatgggatggt

SEQ ID NO: 3588 - RNA, 19 nt, synthetic construct
  source 1..19: mol_type = other RNA
cacctcccagatgggatgg

SEQ ID NO: 3589 - RNA, 19 nt, synthetic construct
  source 1..19: mol_type = other RNA
tcacctcccagatgggatg

SEQ ID NO: 3590 - RNA, 19 nt, synthetic construct
  source 1..19: mol_type = other RNA
ctcacctcccagatgggat

SEQ ID NO: 3591 - RNA, 19 nt, synthetic construct
  source 1..19: mol_type = other RNA
cctcacctcccagatggga

SEQ ID NO: 3592 - RNA, 19 nt, synthetic construct
  source 1..19: mol_type = other RNA
tcctcacctcccagatggg

SEQ ID NO: 3593 - RNA, 19 nt, synthetic construct
  source 1..19: mol_type = other RNA
ctcctcacctcccagatgg

SEQ ID NO: 3594 - RNA, 19 nt, synthetic construct
  source 1..19: mol_type = other RNA
actcctcacctcccagatg

SEQ ID NO: 3595 - RNA, 19 nt, synthetic construct
  source 1..19: mol_type = other RNA
cactcctcacctcccagat

SEQ ID NO: 3596 - RNA, 19 nt, synthetic construct
  source 1..19: mol_type = other RNA
acactcctcacctcccaga

SEQ ID NO: 3597 - RNA, 19 nt, synthetic construct
  source 1..19: mol_type = other RNA
gacactcctcacctcccag

SEQ ID NO: 3598 - RNA, 19 nt, synthetic construct
  source 1..19: mol_type = other RNA
agacactcctcacctccca

SEQ ID NO: 3599 - RNA, 19 nt, synthetic construct
  source 1..19: mol_type = other RNA
gagacactcctcacctccc

SEQ ID NO: 3600 - RNA, 19 nt, synthetic construct
  source 1..19: mol_type = other RNA
ggagacactcctcacctcc

SEQ ID NO: 3601 - RNA, 19 nt, synthetic construct
  source 1..19: mol_type = other RNA
cggagacactcctcacctc

SEQ ID NO: 3602 - RNA, 19 nt, synthetic construct
  source 1..19: mol_type = other RNA
gcggagacactcctcacct

SEQ ID NO: 3603 - RNA, 19 nt, synthetic construct
  source 1..19: mol_type = other RNA
ggcggagacactcctcacc

SEQ ID NO: 3604 - RNA, 19 nt, synthetic construct
  source 1..19: mol_type = other RNA
gggcggagacactcctcac

SEQ ID NO: 3605 - RNA, 19 nt, synthetic construct
  source 1..19: mol_type = other RNA
cgggcggagacactcctca

SEQ ID NO: 3606 - RNA, 19 nt, synthetic construct
  source 1..19: mol_type = other RNA
ccgggcggagacactcctc

SEQ ID NO: 3607 - RNA, 19 nt, synthetic construct
  source 1..19: mol_type = other RNA
gccgggcggagacactcct

SEQ ID NO: 3608 - RNA, 19 nt, synthetic construct
  source 1..19: mol_type = other RNA
ggccgggcggagacactcc

SEQ ID NO: 3609 - RNA, 19 nt, synthetic construct
  source 1..19: mol_type = other RNA
cggccgggcggagacactc

SEQ ID NO: 3610 - RNA, 19 nt, synthetic construct
  source 1..19: mol_type = other RNA
gcggccgggcggagacact

SEQ ID NO: 3611 - RNA, 19 nt, synthetic construct
  source 1..19: mol_type = other RNA
ggcggccgggcggagacac

SEQ ID NO: 3612 - RNA, 19 nt, synthetic construct
  source 1..19: mol_type = other RNA
gggcggccgggcggagaca

SEQ ID NO: 3613 - RNA, 19 nt, synthetic construct
  source 1..19: mol_type = other RNA
tgggcggccgggcggagac

SEQ ID NO: 3614 - RNA, 19 nt, synthetic construct
  source 1..19: mol_type = other RNA
atgggcggccgggcggaga

SEQ ID NO: 3615 - RNA, 19 nt, synthetic construct
  source 1..19: mol_type = other RNA
gatgggcggccgggcggag

SEQ ID NO: 3616 - RNA, 19 nt, synthetic construct
  source 1..19: mol_type = other RNA
agatgggcggccgggcgga

SEQ ID NO: 3617 - RNA, 19 nt, synthetic construct
  source 1..19: mol_type = other RNA
aagatgggcggccgggcgg

SEQ ID NO: 3618 - RNA, 19 nt, synthetic construct
  source 1..19: mol_type = other RNA
gaagatgggcggccgggcg

SEQ ID NO: 3619 - RNA, 19 nt, synthetic construct
  source 1..19: mol_type = other RNA
agaagatgggcggccgggc

SEQ ID NO: 3620 - RNA, 19 nt, synthetic construct
  source 1..19: mol_type = other RNA
cagaagatgggcggccggg

SEQ ID NO: 3621 - RNA, 19 nt, synthetic construct
  source 1..19: mol_type = other RNA
tcagaagatgggcggccgg

SEQ ID NO: 3622 - RNA, 19 nt, synthetic construct
  source 1..19: mol_type = other RNA
ctcagaagatgggcggccg

SEQ ID NO: 3623 - RNA, 19 nt, synthetic construct
  source 1..19: mol_type = other RNA
tctcagaagatgggcggcc

SEQ ID NO: 3624 - RNA, 19 nt, synthetic construct
  source 1..19: mol_type = other RNA
atctcagaagatgggcggc

SEQ ID NO: 3625 - RNA, 19 nt, synthetic construct
  source 1..19: mol_type = other RNA
catctcagaagatgggcgg

SEQ ID NO: 3626 - RNA, 19 nt, synthetic construct
  source 1..19: mol_type = other RNA
acatctcagaagatgggcg

SEQ ID NO: 3627 - RNA, 19 nt, synthetic construct
  source 1..19: mol_type = other RNA
cacatctcagaagatgggc

SEQ ID NO: 3628 - RNA, 19 nt, synthetic construct
  source 1..19: mol_type = other RNA
ccacatctcagaagatggg

SEQ ID NO: 3629 - RNA, 19 nt, synthetic construct
  source 1..19: mol_type = other RNA
cccacatctcagaagatgg

SEQ ID NO: 3630 - RNA, 19 nt, synthetic construct
  source 1..19: mol_type = other RNA
ccccacatctcagaagatg

SEQ ID NO: 3631 - RNA, 19 nt, synthetic construct
  source 1..19: mol_type = other RNA
tccccacatctcagaagat

SEQ ID NO: 3632 - RNA, 19 nt, synthetic construct
  source 1..19: mol_type = other RNA
ctccccacatctcagaaga

SEQ ID NO: 3633 - RNA, 19 nt, synthetic construct
  source 1..19: mol_type = other RNA
gctccccacatctcagaag

SEQ ID NO: 3634 - RNA, 19 nt, synthetic construct
  source 1..19: mol_type = other RNA
cgctccccacatctcagaa

SEQ ID NO: 3635 - RNA, 19 nt, synthetic construct
  source 1..19: mol_type = other RNA
gcgctccccacatctcaga

SEQ ID NO: 3636 - RNA, 19 nt, synthetic construct
  source 1..19: mol_type = other RNA
ggcgctccccacatctcag

SEQ ID NO: 3637 - RNA, 19 nt, synthetic construct
  source 1..19: mol_type = other RNA
aggcgctccccacatctca

SEQ ID NO: 3638 - RNA, 19 nt, synthetic construct
  source 1..19: mol_type = other RNA
aaggcgctccccacatctc

SEQ ID NO: 3639 - RNA, 19 nt, synthetic construct
  source 1..19: mol_type = other RNA
aaaggcgctccccacatct

SEQ ID NO: 3640 - RNA, 19 nt, synthetic construct
  source 1..19: mol_type = other RNA
caaaggcgctccccacatc

SEQ ID NO: 3641 - RNA, 19 nt, synthetic construct
  source 1..19: mol_type = other RNA
gcaaaggcgctccccacat

SEQ ID NO: 3642 - RNA, 19 nt, synthetic construct
  source 1..19: mol_type = other RNA
ggcaaaggcgctccccaca

SEQ ID NO: 3643 - RNA, 19 nt, synthetic construct
  source 1..19: mol_type = other RNA
gggcaaaggcgctccccac

SEQ ID NO: 3644 - RNA, 19 nt, synthetic construct
  source 1..19: mol_type = other RNA
ggggcaaaggcgctcccca

SEQ ID NO: 3645 - RNA, 19 nt, synthetic construct
  source 1..19: mol_type = other RNA
tggggcaaaggcgctcccc

SEQ ID NO: 3646 - RNA, 19 nt, synthetic construct
  source 1..19: mol_type = other RNA
gtggggcaaaggcgctccc

SEQ ID NO: 3647 - RNA, 19 nt, synthetic construct
  source 1..19: mol_type = other RNA
ggtggggcaaaggcgctcc

SEQ ID NO: 3648 - RNA, 19 nt, synthetic construct
  source 1..19: mol_type = other RNA
cggtggggcaaaggcgctc

SEQ ID NO: 3649 - RNA, 19 nt, synthetic construct
  source 1..19: mol_type = other RNA
gcggtggggcaaaggcgct

SEQ ID NO: 3650 - RNA, 19 nt, synthetic construct
  source 1..19: mol_type = other RNA
ggcggtggggcaaaggcgc

SEQ ID NO: 3651 - RNA, 19 nt, synthetic construct
  source 1..19: mol_type = other RNA
gggcggtggggcaaaggcg

SEQ ID NO: 3652 - RNA, 19 nt, synthetic construct
  source 1..19: mol_type = other RNA
agggcggtggggcaaaggc

SEQ ID NO: 3653 - RNA, 19 nt, synthetic construct
  source 1..19: mol_type = other RNA
cagggcggtggggcaaagg

SEQ ID NO: 3654 - RNA, 19 nt, synthetic construct
  source 1..19: mol_type = other RNA
acagggcggtggggcaaag

SEQ ID NO: 3655 - RNA, 19 nt, synthetic construct
  source 1..19: mol_type = other RNA
gacagggcggtggggcaaa

SEQ ID NO: 3656 - RNA, 19 nt, synthetic construct
  source 1..19: mol_type = other RNA
agacagggcggtggggcaa

SEQ ID NO: 3657 - RNA, 19 nt, synthetic construct
  source 1..19: mol_type = other RNA
cagacagggcggtggggca

SEQ ID NO: 3658 - RNA, 19 nt, synthetic construct
  source 1..19: mol_type = other RNA
ccagacagggcggtggggc

SEQ ID NO: 3659 - RNA, 19 nt, synthetic construct
  source 1..19: mol_type = other RNA
cccagacagggcggtgggg

SEQ ID NO: 3660 - RNA, 19 nt, synthetic construct
  source 1..19: mol_type = other RNA
tcccagacagggcggtggg

SEQ ID NO: 3661 - RNA, 19 nt, synthetic construct
  source 1..19: mol_type = other RNA
atcccagacagggcggtgg

SEQ ID NO: 3662 - RNA, 19 nt, synthetic construct
  source 1..19: mol_type = other RNA
catcccagacagggcggtg

SEQ ID NO: 3663 - RNA, 19 nt, synthetic construct
  source 1..19: mol_type = other RNA
acatcccagacagggcggt

SEQ ID NO: 3664 - RNA, 19 nt, synthetic construct
  source 1..19: mol_type = other RNA
cacatcccagacagggcgg

SEQ ID NO: 3665 - RNA, 19 nt, synthetic construct
  source 1..19: mol_type = other RNA
tcacatcccagacagggcg

SEQ ID NO: 3666 - RNA, 19 nt, synthetic construct
  source 1..19: mol_type = other RNA
ctcacatcccagacagggc

SEQ ID NO: 3667 - RNA, 19 nt, synthetic construct
  source 1..19: mol_type = other RNA
cctcacatcccagacaggg

SEQ ID NO: 3668 - RNA, 19 nt, synthetic construct
  source 1..19: mol_type = other RNA
tcctcacatcccagacagg

SEQ ID NO: 3669 - RNA, 19 nt, synthetic construct
  source 1..19: mol_type = other RNA
ctcctcacatcccagacag

SEQ ID NO: 3670 - RNA, 19 nt, synthetic construct
  source 1..19: mol_type = other RNA
gctcctcacatcccagaca

SEQ ID NO: 3671 - RNA, 19 nt, synthetic construct
  source 1..19: mol_type = other RNA
tgctcctcacatcccagac

SEQ ID NO: 3672 - RNA, 19 nt, synthetic construct
  source 1..19: mol_type = other RNA
gtgctcctcacatcccaga

SEQ ID NO: 3673 - RNA, 19 nt, synthetic construct
  source 1..19: mol_type = other RNA
ggtgctcctcacatcccag

SEQ ID NO: 3674 - RNA, 19 nt, synthetic construct
  source 1..19: mol_type = other RNA
aggtgctcctcacatccca

SEQ ID NO: 3675 - RNA, 19 nt, synthetic construct
  source 1..19: mol_type = other RNA
gaggtgctcctcacatccc

SEQ ID NO: 3676 - RNA, 19 nt, synthetic construct
  source 1..19: mol_type = other RNA
agaggtgctcctcacatcc

SEQ ID NO: 3677 - RNA, 19 nt, synthetic construct
  source 1..19: mol_type = other RNA
cagaggtgctcctcacatc

SEQ ID NO: 3678 - RNA, 19 nt, synthetic construct
  source 1..19: mol_type = other RNA
gcagaggtgctcctcacat

SEQ ID NO: 3679 - RNA, 19 nt, synthetic construct
  source 1..19: mol_type = other RNA
ggcagaggtgctcctcaca

SEQ ID NO: 3680 - RNA, 19 nt, synthetic construct
  source 1..19: mol_type = other RNA
gggcagaggtgctcctcac

SEQ ID NO: 3681 - RNA, 19 nt, synthetic construct
  source 1..19: mol_type = other RNA
cgggcagaggtgctcctca

SEQ ID NO: 3682 - RNA, 19 nt, synthetic construct
  source 1..19: mol_type = other RNA
ccgggcagaggtgctcctc

SEQ ID NO: 3683 - RNA, 19 nt, synthetic construct
  source 1..19: mol_type = other RNA
gccgggcagaggtgctcct

SEQ ID NO: 3684 - RNA, 19 nt, synthetic construct
  source 1..19: mol_type = other RNA
ggccgggcagaggtgctcc

SEQ ID NO: 3685 - RNA, 19 nt, synthetic construct
  source 1..19: mol_type = other RNA
cggccgggcagaggtgctc

SEQ ID NO: 3686 - RNA, 19 nt, synthetic construct
  source 1..19: mol_type = other RNA
gcggccgggcagaggtgct

SEQ ID NO: 3687 - RNA, 19 nt, synthetic construct
  source 1..19: mol_type = other RNA
cgcggccgggcagaggtgc

SEQ ID NO: 3688 - RNA, 19 nt, synthetic construct
  source 1..19: mol_type = other RNA
tcgcggccgggcagaggtg

SEQ ID NO: 3689 - RNA, 19 nt, synthetic construct
  source 1..19: mol_type = other RNA
gtcgcggccgggcagaggt

SEQ ID NO: 3690 - RNA, 19 nt, synthetic construct
  source 1..19: mol_type = other RNA
ggtcgcggccgggcagagg

SEQ ID NO: 3691 - RNA, 19 nt, synthetic construct
  source 1..19: mol_type = other RNA
gggtcgcggccgggcagag

SEQ ID NO: 3692 - RNA, 19 nt, synthetic construct
  source 1..19: mol_type = other RNA
ggggtcgcggccgggcaga

SEQ ID NO: 3693 - RNA, 19 nt, synthetic construct
  source 1..19: mol_type = other RNA
cggggtcgcggccgggcag

SEQ ID NO: 3694 - RNA, 19 nt, synthetic construct
  source 1..19: mol_type = other RNA
acggggtcgcggccgggca

SEQ ID NO: 3695 - RNA, 19 nt, synthetic construct
  source 1..19: mol_type = other RNA
gacggggtcgcggccgggc

SEQ ID NO: 3696 - RNA, 19 nt, synthetic construct
  source 1..19: mol_type = other RNA
agacggggtcgcggccggg

SEQ ID NO: 3697 - RNA, 19 nt, synthetic construct
  source 1..19: mol_type = other RNA
cagacggggtcgcggccgg

SEQ ID NO: 3698 - RNA, 19 nt, synthetic construct
  source 1..19: mol_type = other RNA
ccagacggggtcgcggccg

SEQ ID NO: 3699 - RNA, 19 nt, synthetic construct
  source 1..19: mol_type = other RNA
cccagacggggtcgcggcc

SEQ ID NO: 3700 - RNA, 19 nt, synthetic construct
  source 1..19: mol_type = other RNA
tcccagacggggtcgcggc

SEQ ID NO: 3701 - RNA, 19 nt, synthetic construct
  source 1..19: mol_type = other RNA
ctcccagacggggtcgcgg

SEQ ID NO: 3702 - RNA, 19 nt, synthetic construct
  source 1..19: mol_type = other RNA
cctcccagacggggtcgcg

SEQ ID NO: 3703 - RNA, 19 nt, synthetic construct
  source 1..19: mol_type = other RNA
acctcccagacggggtcgc

SEQ ID NO: 3704 - RNA, 19 nt, synthetic construct
  source 1..19: mol_type = other RNA
cacctcccagacggggtcg

SEQ ID NO: 3705 - RNA, 19 nt, synthetic construct
  source 1..19: mol_type = other RNA
tcacctcccagacggggtc

SEQ ID NO: 3706 - RNA, 19 nt, synthetic construct
  source 1..19: mol_type = other RNA
ctcacctcccagacggggt

SEQ ID NO: 3707 - RNA, 19 nt, synthetic construct
  source 1..19: mol_type = other RNA
cctcacctcccagacgggg

SEQ ID NO: 3708 - RNA, 19 nt, synthetic construct
  source 1..19: mol_type = other RNA
tcctcacctcccagacggg

SEQ ID NO: 3709 - RNA, 19 nt, synthetic construct
  source 1..19: mol_type = other RNA
ctcctcacctcccagacgg

SEQ ID NO: 3710 - RNA, 19 nt, synthetic construct
  source 1..19: mol_type = other RNA
gctcctcacctcccagacg

SEQ ID NO: 3711 - RNA, 19 nt, synthetic construct
  source 1..19: mol_type = other RNA
cgctcctcacctcccagac

SEQ ID NO: 3712 - RNA, 19 nt, synthetic construct
  source 1..19: mol_type = other RNA
acgctcctcacctcccaga

SEQ ID NO: 3713 - RNA, 19 nt, synthetic construct
  source 1..19: mol_type = other RNA
gacgctcctcacctcccag

SEQ ID NO: 3714 - RNA, 19 nt, synthetic construct
  source 1..19: mol_type = other RNA
agacgctcctcacctccca

SEQ ID NO: 3715 - RNA, 19 nt, synthetic construct
  source 1..19: mol_type = other RNA
gagacgctcctcacctccc

SEQ ID NO: 3716 - RNA, 19 nt, synthetic construct
  source 1..19: mol_type = other RNA
agagacgctcctcacctcc

SEQ ID NO: 3717 - RNA, 19 nt, synthetic construct
  source 1..19: mol_type = other RNA
cagagacgctcctcacctc

SEQ ID NO: 3718 - RNA, 19 nt, synthetic construct
  source 1..19: mol_type = other RNA
gcagagacgctcctcacct

SEQ ID NO: 3719 - RNA, 19 nt, synthetic construct
  source 1..19: mol_type = other RNA
ggcagagacgctcctcacc

SEQ ID NO: 3720 - RNA, 19 nt, synthetic construct
  source 1..19: mol_type = other RNA
gggcagagacgctcctcac

SEQ ID NO: 3721 - RNA, 19 nt, synthetic construct
  source 1..19: mol_type = other RNA
tgggcagagacgctcctca

SEQ ID NO: 3722 - RNA, 19 nt, synthetic construct
  source 1..19: mol_type = other RNA
ctgggcagagacgctcctc

SEQ ID NO: 3723 - RNA, 19 nt, synthetic construct
  source 1..19: mol_type = other RNA
gctgggcagagacgctcct

SEQ ID NO: 3724 - RNA, 19 nt, synthetic construct
  source 1..19: mol_type = other RNA
ggctgggcagagacgctcc

SEQ ID NO: 3725 - RNA, 19 nt, synthetic construct
  source 1..19: mol_type = other RNA
cggctgggcagagacgctc

SEQ ID NO: 3726 - RNA, 19 nt, synthetic construct
  source 1..19: mol_type = other RNA
gcggctgggcagagacgct

SEQ ID NO: 3727 - RNA, 19 nt, synthetic construct
  source 1..19: mol_type = other RNA
ggcggctgggcagagacgc

SEQ ID NO: 3728 - RNA, 19 nt, synthetic construct
  source 1..19: mol_type = other RNA
gggcggctgggcagagacg

SEQ ID NO: 3729 - RNA, 19 nt, synthetic construct
  source 1..19: mol_type = other RNA
ggggcggctgggcagagac

SEQ ID NO: 3730 - RNA, 19 nt, synthetic construct
  source 1..19: mol_type = other RNA
tggggcggctgggcagaga

SEQ ID NO: 3731 - RNA, 19 nt, synthetic construct
  source 1..19: mol_type = other RNA
atggggcggctgggcagag

SEQ ID NO: 3732 - RNA, 19 nt, synthetic construct
  source 1..19: mol_type = other RNA
gatggggcggctgggcaga

SEQ ID NO: 3733 - RNA, 19 nt, synthetic construct
  source 1..19: mol_type = other RNA
agatggggcggctgggcag

SEQ ID NO: 3734 - RNA, 19 nt, synthetic construct
  source 1..19: mol_type = other RNA
cagatggggcggctgggca

SEQ ID NO: 3735 - RNA, 19 nt, synthetic construct
  source 1..19: mol_type = other RNA
tcagatggggcggctgggc

SEQ ID NO: 3736 - RNA, 19 nt, synthetic construct
  source 1..19: mol_type = other RNA
ctcagatggggcggctggg

SEQ ID NO: 3737 - RNA, 19 nt, synthetic construct
  source 1..19: mol_type = other RNA
tctcagatggggcggctgg

SEQ ID NO: 3738 - RNA, 19 nt, synthetic construct
  source 1..19: mol_type = other RNA
ttctcagatggggcggctg

SEQ ID NO: 3739 - RNA, 19 nt, synthetic construct
  source 1..19: mol_type = other RNA
cttctcagatggggcggct

SEQ ID NO: 3740 - RNA, 19 nt, synthetic construct
  source 1..19: mol_type = other RNA
ccttctcagatggggcggc

SEQ ID NO: 3741 - RNA, 19 nt, synthetic construct
  source 1..19: mol_type = other RNA
cccttctcagatggggcgg

SEQ ID NO: 3742 - RNA, 19 nt, synthetic construct
  source 1..19: mol_type = other RNA
tcccttctcagatggggcg

SEQ ID NO: 3743 - RNA, 19 nt, synthetic construct
  source 1..19: mol_type = other RNA
ctcccttctcagatggggc

SEQ ID NO: 3744 - RNA, 19 nt, synthetic construct
  source 1..19: mol_type = other RNA
cctcccttctcagatgggg

SEQ ID NO: 3745 - RNA, 19 nt, synthetic construct
  source 1..19: mol_type = other RNA
tcctcccttctcagatggg

SEQ ID NO: 3746 - RNA, 19 nt, synthetic construct
  source 1..19: mol_type = other RNA
ctcctcccttctcagatgg

SEQ ID NO: 3747 - RNA, 19 nt, synthetic construct
  source 1..19: mol_type = other RNA
tctcctcccttctcagatg

SEQ ID NO: 3748 - RNA, 19 nt, synthetic construct
  source 1..19: mol_type = other RNA
gtctcctcccttctcagat

SEQ ID NO: 3749 - RNA, 19 nt, synthetic construct
  source 1..19: mol_type = other RNA
ggtctcctcccttctcaga

SEQ ID NO: 3750 - RNA, 19 nt, synthetic construct
  source 1..19: mol_type = other RNA
gggtctcctcccttctcag

SEQ ID NO: 3751 - RNA, 19 nt, synthetic construct
  source 1..19: mol_type = other RNA
agggtctcctcccttctca

SEQ ID NO: 3752 - RNA, 19 nt, synthetic construct
  source 1..19: mol_type = other RNA
gagggtctcctcccttctc

SEQ ID NO: 3753 - RNA, 19 nt, synthetic construct
  source 1..19: mol_type = other RNA
ggagggtctcctcccttct

SEQ ID NO: 3754 - RNA, 19 nt, synthetic construct
  source 1..19: mol_type = other RNA
cggagggtctcctcccttc

SEQ ID NO: 3755 - RNA, 19 nt, synthetic construct
  source 1..19: mol_type = other RNA
gcggagggtctcctccctt

SEQ ID NO: 3756 - RNA, 19 nt, synthetic construct
  source 1..19: mol_type = other RNA
ggcggagggtctcctccct

SEQ ID NO: 3757 - RNA, 19 nt, synthetic construct
  source 1..19: mol_type = other RNA
aggcggagggtctcctccc

SEQ ID NO: 3758 - RNA, 19 nt, synthetic construct
  source 1..19: mol_type = other RNA
caggcggagggtctcctcc

SEQ ID NO: 3759 - RNA, 19 nt, synthetic construct
  source 1..19: mol_type = other RNA
ccaggcggagggtctcctc

SEQ ID NO: 3760 - RNA, 19 nt, synthetic construct
  source 1..19: mol_type = other RNA
gccaggcggagggtctcct

SEQ ID NO: 3761 - RNA, 19 nt, synthetic construct
  source 1..19: mol_type = other RNA
tgccaggcggagggtctcc

SEQ ID NO: 3762 - RNA, 19 nt, synthetic construct
  source 1..19: mol_type = other RNA
ttgccaggcggagggtctc

SEQ ID NO: 3763 - RNA, 19 nt, synthetic construct
  source 1..19: mol_type = other RNA
gttgccaggcggagggtct

SEQ ID NO: 3764 - RNA, 19 nt, synthetic construct
  source 1..19: mol_type = other RNA
ggttgccaggcggagggtc

SEQ ID NO: 3765 - RNA, 19 nt, synthetic construct
  source 1..19: mol_type = other RNA
cggttgccaggcggagggt

SEQ ID NO: 3766 - RNA, 19 nt, synthetic construct
  source 1..19: mol_type = other RNA
gcggttgccaggcggaggg

SEQ ID NO: 3767 - RNA, 19 nt, synthetic construct
  source 1..19: mol_type = other RNA
ggcggttgccaggcggagg

SEQ ID NO: 3768 - RNA, 19 nt, synthetic construct
  source 1..19: mol_type = other RNA
gggcggttgccaggcggag

SEQ ID NO: 3769 - RNA, 19 nt, synthetic construct
  source 1..19: mol_type = other RNA
ggggcggttgccaggcgga

SEQ ID NO: 3770 - RNA, 19 nt, synthetic construct
  source 1..19: mol_type = other RNA
cggggcggttgccaggcgg

SEQ ID NO: 3771 - RNA, 19 nt, synthetic construct
  source 1..19: mol_type = other RNA
acggggcggttgccaggcg

SEQ ID NO: 3772 - RNA, 19 nt, synthetic construct
  source 1..19: mol_type = other RNA
gacggggcggttgccaggc

SEQ ID NO: 3773 - RNA, 19 nt, synthetic construct
  source 1..19: mol_type = other RNA
agacggggcggttgccagg

SEQ ID NO: 3774 - RNA, 19 nt, synthetic construct
  source 1..19: mol_type = other RNA
cagacggggcggttgccag

SEQ ID NO: 3775 - RNA, 19 nt, synthetic construct
  source 1..19: mol_type = other RNA
tcagacggggcggttgcca

SEQ ID NO: 3776 - RNA, 19 nt, synthetic construct
  source 1..19: mol_type = other RNA
ctcagacggggcggttgcc

SEQ ID NO: 3777 - RNA, 19 nt, synthetic construct
  source 1..19: mol_type = other RNA
tctcagacggggcggttgc

SEQ ID NO: 3778 - RNA, 19 nt, synthetic construct
  source 1..19: mol_type = other RNA
ttctcagacggggcggttg

SEQ ID NO: 3779 - RNA, 19 nt, synthetic construct
  source 1..19: mol_type = other RNA
cttctcagacggggcggtt

SEQ ID NO: 3780 - RNA, 19 nt, synthetic construct
  source 1..19: mol_type = other RNA
acttctcagacggggcggt

SEQ ID NO: 3781 - RNA, 19 nt, synthetic construct
  source 1..19: mol_type = other RNA
cacttctcagacggggcgg

SEQ ID NO: 3782 - RNA, 19 nt, synthetic construct
  source 1..19: mol_type = other RNA
tcacttctcagacggggcg

SEQ ID NO: 3783 - RNA, 19 nt, synthetic construct
  source 1..19: mol_type = other RNA
ctcacttctcagacggggc

SEQ ID NO: 3784 - RNA, 19 nt, synthetic construct
  source 1..19: mol_type = other RNA
cctcacttctcagacgggg

SEQ ID NO: 3785 - RNA, 19 nt, synthetic construct
  source 1..19: mol_type = other RNA
tcctcacttctcagacggg

SEQ ID NO: 3786 - RNA, 19 nt, synthetic construct
  source 1..19: mol_type = other RNA
ctcctcacttctcagacgg

SEQ ID NO: 3787 - RNA, 19 nt, synthetic construct
  source 1..19: mol_type = other RNA
gctcctcacttctcagacg

SEQ ID NO: 3788 - RNA, 19 nt, synthetic construct
  source 1..19: mol_type = other RNA
ggctcctcacttctcagac

SEQ ID NO: 3789 - RNA, 19 nt, synthetic construct
  source 1..19: mol_type = other RNA
gggctcctcacttctcaga

SEQ ID NO: 3790 - RNA, 19 nt, synthetic construct
  source 1..19: mol_type = other RNA
ggggctcctcacttctcag

SEQ ID NO: 3791 - RNA, 19 nt, synthetic construct
  source 1..19: mol_type = other RNA
aggggctcctcacttctca

SEQ ID NO: 3792 - RNA, 19 nt, synthetic construct
  source 1..19: mol_type = other RNA
gaggggctcctcacttctc

SEQ ID NO: 3793 - RNA, 19 nt, synthetic construct
  source 1..19: mol_type = other RNA
ggaggggctcctcacttct

SEQ ID NO: 3794 - RNA, 19 nt, synthetic construct
  source 1..19: mol_type = other RNA
cggaggggctcctcacttc

SEQ ID NO: 3795 - RNA, 19 nt, synthetic construct
  source 1..19: mol_type = other RNA
gcggaggggctcctcactt

SEQ ID NO: 3796 - RNA, 19 nt, synthetic construct
  source 1..19: mol_type = other RNA
ggcggaggggctcctcact

SEQ ID NO: 3797 - RNA, 19 nt, synthetic construct
  source 1..19: mol_type = other RNA
gggcggaggggctcctcac

SEQ ID NO: 3798 - RNA, 19 nt, synthetic construct
  source 1..19: mol_type = other RNA
cgggcggaggggctcctca

SEQ ID NO: 3799 - RNA, 19 nt, synthetic construct
  source 1..19: mol_type = other RNA
ccgggcggaggggctcctc

SEQ ID NO: 3800 - RNA, 19 nt, synthetic construct
  source 1..19: mol_type = other RNA
gccgggcggaggggctcct

SEQ ID NO: 3801 - RNA, 19 nt, synthetic construct
  source 1..19: mol_type = other RNA
tgccgggcggaggggctcc

SEQ ID NO: 3802 - RNA, 19 nt, synthetic construct
  source 1..19: mol_type = other RNA
ctgccgggcggaggggctc

SEQ ID NO: 3803 - RNA, 19 nt, synthetic construct
  source 1..19: mol_type = other RNA
gctgccgggcggaggggct

SEQ ID NO: 3804 - RNA, 19 nt, synthetic construct
  source 1..19: mol_type = other RNA
ggctgccgggcggaggggc

SEQ ID NO: 3805 - RNA, 19 nt, synthetic construct
  source 1..19: mol_type = other RNA
tggctgccgggcggagggg

SEQ ID NO: 3806 - RNA, 19 nt, synthetic construct
  source 1..19: mol_type = other RNA
gtggctgccgggcggaggg

SEQ ID NO: 3807 - RNA, 19 nt, synthetic construct
  source 1..19: mol_type = other RNA
ggtggctgccgggcggagg

SEQ ID NO: 3808 - RNA, 19 nt, synthetic construct
  source 1..19: mol_type = other RNA
gggtggctgccgggcggag

SEQ ID NO: 3809 - RNA, 19 nt, synthetic construct
  source 1..19: mol_type = other RNA
ggggtggctgccgggcgga

SEQ ID NO: 3810 - RNA, 19 nt, synthetic construct
  source 1..19: mol_type = other RNA
cggggtggctgccgggcgg

SEQ ID NO: 3811 - RNA, 19 nt, synthetic construct
  source 1..19: mol_type = other RNA
acggggtggctgccgggcg

SEQ ID NO: 3812 - RNA, 19 nt, synthetic construct
  source 1..19: mol_type = other RNA
gacggggtggctgccgggc

SEQ ID NO: 3813 - RNA, 19 nt, synthetic construct
  source 1..19: mol_type = other RNA
agacggggtggctgccggg

SEQ ID NO: 3814 - RNA, 19 nt, synthetic construct
  source 1..19: mol_type = other RNA
cagacggggtggctgccgg

SEQ ID NO: 3815 - RNA, 19 nt, synthetic construct
  source 1..19: mol_type = other RNA
ccagacggggtggctgccg

SEQ ID NO: 3816 - RNA, 19 nt, synthetic construct
  source 1..19: mol_type = other RNA
cccagacggggtggctgcc

SEQ ID NO: 3817 - RNA, 19 nt, synthetic construct
  source 1..19: mol_type = other RNA
tcccagacggggtggctgc

SEQ ID NO: 3818 - RNA, 19 nt, synthetic construct
  source 1..19: mol_type = other RNA
ttcccagacggggtggctg

SEQ ID NO: 3819 - RNA, 19 nt, synthetic construct
  source 1..19: mol_type = other RNA
cttcccagacggggtggct

SEQ ID NO: 3820 - RNA, 19 nt, synthetic construct
  source 1..19: mol_type = other RNA
acttcccagacggggtggc

SEQ ID NO: 3821 - RNA, 19 nt, synthetic construct
  source 1..19: mol_type = other RNA
cacttcccagacggggtgg

SEQ ID NO: 3822 - RNA, 19 nt, synthetic construct
  source 1..19: mol_type = other RNA
tcacttcccagacggggtg

SEQ ID NO: 3823 - RNA, 19 nt, synthetic construct
  source 1..19: mol_type = other RNA
ctcacttcccagacggggt

SEQ ID NO: 3824 - RNA, 19 nt, synthetic construct
  source 1..19: mol_type = other RNA
cctcacttcccagacgggg

SEQ ID NO: 3825 - RNA, 19 nt, synthetic construct
  source 1..19: mol_type = other RNA
tcctcacttcccagacggg

SEQ ID NO: 3826 - RNA, 19 nt, synthetic construct
  source 1..19: mol_type = other RNA
ctcctcacttcccagacgg

SEQ ID NO: 3827 - RNA, 19 nt, synthetic construct
  source 1..19: mol_type = other RNA
gctcctcacttcccagacg

SEQ ID NO: 3828 - RNA, 19 nt, synthetic construct
  source 1..19: mol_type = other RNA
cgctcctcacttcccagac

SEQ ID NO: 3829 - RNA, 19 nt, synthetic construct
  source 1..19: mol_type = other RNA
acgctcctcacttcccaga

SEQ ID NO: 3830 - RNA, 19 nt, synthetic construct
  source 1..19: mol_type = other RNA
gacgctcctcacttcccag

SEQ ID NO: 3831 - RNA, 19 nt, synthetic construct
  source 1..19: mol_type = other RNA
agacgctcctcacttccca

SEQ ID NO: 3832 - RNA, 19 nt, synthetic construct
  source 1..19: mol_type = other RNA
gagacgctcctcacttccc

SEQ ID NO: 3833 - RNA, 19 nt, synthetic construct
  source 1..19: mol_type = other RNA
ggagacgctcctcacttcc

SEQ ID NO: 3834 - RNA, 19 nt, synthetic construct
  source 1..19: mol_type = other RNA
cggagacgctcctcacttc

SEQ ID NO: 3835 - RNA, 19 nt, synthetic construct
  source 1..19: mol_type = other RNA
gcggagacgctcctcactt

SEQ ID NO: 3836 - RNA, 19 nt, synthetic construct
  source 1..19: mol_type = other RNA
ggcggagacgctcctcact

SEQ ID NO: 3837 - RNA, 19 nt, synthetic construct
  source 1..19: mol_type = other RNA
tggcggagacgctcctcac

SEQ ID NO: 3838 - RNA, 19 nt, synthetic construct
  source 1..19: mol_type = other RNA
ctggcggagacgctcctca

SEQ ID NO: 3839 - RNA, 19 nt, synthetic construct
  source 1..19: mol_type = other RNA
cctggcggagacgctcctc

SEQ ID NO: 3840 - RNA, 19 nt, synthetic construct
  source 1..19: mol_type = other RNA
gcctggcggagacgctcct

SEQ ID NO: 3841 - RNA, 19 nt, synthetic construct
  source 1..19: mol_type = other RNA
tgcctggcggagacgctcc

SEQ ID NO: 3842 - RNA, 19 nt, synthetic construct
  source 1..19: mol_type = other RNA
ctgcctggcggagacgctc

SEQ ID NO: 3843 - RNA, 19 nt, synthetic construct
  source 1..19: mol_type = other RNA
gctgcctggcggagacgct

SEQ ID NO: 3844 - RNA, 19 nt, synthetic construct
  source 1..19: mol_type = other RNA
ggctgcctggcggagacgc

SEQ ID NO: 3845 - RNA, 19 nt, synthetic construct
  source 1..19: mol_type = other RNA
tggctgcctggcggagacg

SEQ ID NO: 3846 - RNA, 19 nt, synthetic construct
  source 1..19: mol_type = other RNA
gtggctgcctggcggagac

SEQ ID NO: 3847 - RNA, 19 nt, synthetic construct
  source 1..19: mol_type = other RNA
ggtggctgcctggcggaga

SEQ ID NO: 3848 - RNA, 19 nt, synthetic construct
  source 1..19: mol_type = other RNA
gggtggctgcctggcggag

SEQ ID NO: 3849 - RNA, 19 nt, synthetic construct
  source 1..19: mol_type = other RNA
ggggtggctgcctggcgga

SEQ ID NO: 3850 - RNA, 19 nt, synthetic construct
  source 1..19: mol_type = other RNA
cggggtggctgcctggcgg

SEQ ID NO: 3851 - RNA, 19 nt, synthetic construct
  source 1..19: mol_type = other RNA
acggggtggctgcctggcg

SEQ ID NO: 3852 - RNA, 19 nt, synthetic construct
  source 1..19: mol_type = other RNA
gacggggtggctgcctggc

SEQ ID NO: 3853 - RNA, 19 nt, synthetic construct
  source 1..19: mol_type = other RNA
ggacggggtggctgcctgg

SEQ ID NO: 3854 - RNA, 19 nt, synthetic construct
  source 1..19: mol_type = other RNA
cggacggggtggctgcctg

SEQ ID NO: 3855 - RNA, 19 nt, synthetic construct
  source 1..19: mol_type = other RNA
ccggacggggtggctgcct

SEQ ID NO: 3856 - RNA, 19 nt, synthetic construct
  source 1..19: mol_type = other RNA
cccggacggggtggctgcc

SEQ ID NO: 3857 - RNA, 19 nt, synthetic construct
  source 1..19: mol_type = other RNA
tcccggacggggtggctgc

SEQ ID NO: 3858 - RNA, 19 nt, synthetic construct
  source 1..19: mol_type = other RNA
ctcccggacggggtggctg

SEQ ID NO: 3859 - RNA, 19 nt, synthetic construct
  source 1..19: mol_type = other RNA
cctcccggacggggtggct

SEQ ID NO: 3860 - RNA, 19 nt, synthetic construct
  source 1..19: mol_type = other RNA
ccctcccggacggggtggc

SEQ ID NO: 3861 - RNA, 19 nt, synthetic construct
  source 1..19: mol_type = other RNA
tccctcccggacggggtgg

SEQ ID NO: 3862 - RNA, 19 nt, synthetic construct
  source 1..19: mol_type = other RNA
ctccctcccggacggggtg

SEQ ID NO: 3863 - RNA, 19 nt, synthetic construct
  source 1..19: mol_type = other RNA
cctccctcccggacggggt

SEQ ID NO: 3864 - RNA, 19 nt, synthetic construct
  source 1..19: mol_type = other RNA
acctccctcccggacgggg

SEQ ID NO: 3865 - RNA, 19 nt, synthetic construct
  source 1..19: mol_type = other RNA
cacctccctcccggacggg

SEQ ID NO: 3866 - RNA, 19 nt, synthetic construct
  source 1..19: mol_type = other RNA
ccacctccctcccggacgg

SEQ ID NO: 3867 - RNA, 19 nt, synthetic construct
  source 1..19: mol_type = other RNA
cccacctccctcccggacg

SEQ ID NO: 3868 - RNA, 19 nt, synthetic construct
  source 1..19: mol_type = other RNA
ccccacctccctcccggac

SEQ ID NO: 3869 - RNA, 19 nt, synthetic construct
  source 1..19: mol_type = other RNA
cccccacctccctcccgga

SEQ ID NO: 3870 - RNA, 19 nt, synthetic construct
  source 1..19: mol_type = other RNA
acccccacctccctcccgg

SEQ ID NO: 3871 - RNA, 19 nt, synthetic construct
  source 1..19: mol_type = other RNA
gacccccacctccctcccg

SEQ ID NO: 3872 - RNA, 19 nt, synthetic construct
  source 1..19: mol_type = other RNA
tgacccccacctccctccc

SEQ ID NO: 3873 - RNA, 19 nt, synthetic construct
  source 1..19: mol_type = other RNA
ctgacccccacctccctcc

SEQ ID NO: 3874 - RNA, 19 nt, synthetic construct
  source 1..19: mol_type = other RNA
gctgacccccacctccctc

SEQ ID NO: 3875 - RNA, 19 nt, synthetic construct
  source 1..19: mol_type = other RNA
ggctgacccccacctccct

SEQ ID NO: 3876 - RNA, 19 nt, synthetic construct
  source 1..19: mol_type = other RNA
gggctgacccccacctccc

SEQ ID NO: 3877 - RNA, 19 nt, synthetic construct
  source 1..19: mol_type = other RNA
ggggctgacccccacctcc

SEQ ID NO: 3878 - RNA, 19 nt, synthetic construct
  source 1..19: mol_type = other RNA
gggggctgacccccacctc

SEQ ID NO: 3879 - RNA, 19 nt, synthetic construct
  source 1..19: mol_type = other RNA
cgggggctgacccccacct

SEQ ID NO: 3880 - RNA, 19 nt, synthetic construct
  source 1..19: mol_type = other RNA
gcgggggctgacccccacc

SEQ ID NO: 3881 - RNA, 19 nt, synthetic construct
  source 1..19: mol_type = other RNA
ggcgggggctgacccccac

SEQ ID NO: 3882 - RNA, 19 nt, synthetic construct
  source 1..19: mol_type = other RNA
tggcgggggctgaccccca

SEQ ID NO: 3883 - RNA, 19 nt, synthetic construct
  source 1..19: mol_type = other RNA
ctggcgggggctgaccccc

SEQ ID NO: 3884 - RNA, 19 nt, synthetic construct
  source 1..19: mol_type = other RNA
cctggcgggggctgacccc

SEQ ID NO: 3885 - RNA, 19 nt, synthetic construct
  source 1..19: mol_type = other RNA
gcctggcgggggctgaccc

SEQ ID NO: 3886 - RNA, 19 nt, synthetic construct
  source 1..19: mol_type = other RNA
ggcctggcgggggctgacc

SEQ ID NO: 3887 - RNA, 19 nt, synthetic construct
  source 1..19: mol_type = other RNA
tggcctggcgggggctgac

SEQ ID NO: 3888 - RNA, 19 nt, synthetic construct
  source 1..19: mol_type = other RNA
ctggcctggcgggggctga

SEQ ID NO: 3889 - RNA, 19 nt, synthetic construct
  source 1..19: mol_type = other RNA
gctggcctggcgggggctg

SEQ ID NO: 3890 - RNA, 19 nt, synthetic construct
  source 1..19: mol_type = other RNA
agctggcctggcgggggct

SEQ ID NO: 3891 - RNA, 19 nt, synthetic construct
  source 1..19: mol_type = other RNA
cagctggcctggcgggggc

SEQ ID NO: 3892 - RNA, 19 nt, synthetic construct
  source 1..19: mol_type = other RNA
gcagctggcctggcggggg

SEQ ID NO: 3893 - RNA, 19 nt, synthetic construct
  source 1..19: mol_type = other RNA
ggcagctggcctggcgggg

SEQ ID NO: 3894 - RNA, 19 nt, synthetic construct
  source 1..19: mol_type = other RNA
gggcagctggcctggcggg

SEQ ID NO: 3895 - RNA, 19 nt, synthetic construct
  source 1..19: mol_type = other RNA
ggggcagctggcctggcgg

SEQ ID NO: 3896 - RNA, 19 nt, synthetic construct
  source 1..19: mol_type = other RNA
tggggcagctggcctggcg

SEQ ID NO: 3897 - RNA, 19 nt, synthetic construct
  source 1..19: mol_type = other RNA
atggggcagctggcctggc

SEQ ID NO: 3898 - RNA, 19 nt, synthetic construct
  source 1..19: mol_type = other RNA
gatggggcagctggcctgg

SEQ ID NO: 3899 - RNA, 19 nt, synthetic construct
  source 1..19: mol_type = other RNA
ggatggggcagctggcctg

SEQ ID NO: 3900 - RNA, 19 nt, synthetic construct
  source 1..19: mol_type = other RNA
cggatggggcagctggcct

SEQ ID NO: 3901 - RNA, 19 nt, synthetic construct
  source 1..19: mol_type = other RNA
ccggatggggcagctggcc

SEQ ID NO: 3902 - RNA, 19 nt, synthetic construct
  source 1..19: mol_type = other RNA
cccggatggggcagctggc

SEQ ID NO: 3903 - RNA, 19 nt, synthetic construct
  source 1..19: mol_type = other RNA
tcccggatggggcagctgg

SEQ ID NO: 3904 - RNA, 19 nt, synthetic construct
  source 1..19: mol_type = other RNA
ctcccggatggggcagctg

SEQ ID NO: 3905 - RNA, 19 nt, synthetic construct
  source 1..19: mol_type = other RNA
cctcccggatggggcagct

SEQ ID NO: 3906 - RNA, 19 nt, synthetic construct
  source 1..19: mol_type = other RNA
ccctcccggatggggcagc

SEQ ID NO: 3907 - RNA, 19 nt, synthetic construct
  source 1..19: mol_type = other RNA
tccctcccggatggggcag

SEQ ID NO: 3908 - RNA, 19 nt, synthetic construct
  source 1..19: mol_type = other RNA
ctccctcccggatggggca

SEQ ID NO: 3909 - RNA, 19 nt, synthetic construct
  source 1..19: mol_type = other RNA
cctccctcccggatggggc

SEQ ID NO: 3910 - RNA, 19 nt, synthetic construct
  source 1..19: mol_type = other RNA
acctccctcccggatgggg

SEQ ID NO: 3911 - RNA, 19 nt, synthetic construct
  source 1..19: mol_type = other RNA
cacctccctcccggatggg

SEQ ID NO: 3912 - RNA, 19 nt, synthetic construct
  source 1..19: mol_type = other RNA
ccacctccctcccggatgg

SEQ ID NO: 3913 - RNA, 19 nt, synthetic construct
  source 1..19: mol_type = other RNA
cccacctccctcccggatg

SEQ ID NO: 3914 - RNA, 19 nt, synthetic construct
  source 1..19: mol_type = other RNA
ccccacctccctcccggat

SEQ ID NO: 3915 - RNA, 19 nt, synthetic construct
  source 1..19: mol_type = other RNA
cccccacctccctcccgga

SEQ ID NO: 3916 - RNA, 19 nt, synthetic construct
  source 1..19: mol_type = other RNA
ccccccacctccctcccgg

SEQ ID NO: 3917 - RNA, 19 nt, synthetic construct
  source 1..19: mol_type = other RNA
cccccccacctccctcccg

SEQ ID NO: 3918 - RNA, 19 nt, synthetic construct
  source 1..19: mol_type = other RNA
ccccccccacctccctccc

SEQ ID NO: 3919 - RNA, 19 nt, synthetic construct
  source 1..19: mol_type = other RNA
accccccccacctccctcc

SEQ ID NO: 3920 - RNA, 19 nt, synthetic construct
  source 1..19: mol_type = other RNA
gaccccccccacctccctc

SEQ ID NO: 3921 - RNA, 19 nt, synthetic construct
  source 1..19: mol_type = other RNA
tgaccccccccacctccct

SEQ ID NO: 3922 - RNA, 19 nt, synthetic construct
  source 1..19: mol_type = other RNA
ctgaccccccccacctccc

SEQ ID NO: 3923 - RNA, 19 nt, synthetic construct
  source 1..19: mol_type = other RNA
gctgaccccccccacctcc

SEQ ID NO: 3924 - RNA, 19 nt, synthetic construct
  source 1..19: mol_type = other RNA
ggctgaccccccccacctc

SEQ ID NO: 3925 - RNA, 19 nt, synthetic construct
  source 1..19: mol_type = other RNA
gggctgaccccccccacct

SEQ ID NO: 3926 - RNA, 19 nt, synthetic construct
  source 1..19: mol_type = other RNA
ggggctgaccccccccacc

SEQ ID NO: 3927 - RNA, 19 nt, synthetic construct
  source 1..19: mol_type = other RNA
gggggctgaccccccccac

SEQ ID NO: 3928 - RNA, 19 nt, synthetic construct
  source 1..19: mol_type = other RNA
ggggggctgacccccccca

SEQ ID NO: 3929 - RNA, 19 nt, synthetic construct
  source 1..19: mol_type = other RNA
cggggggctgacccccccc

SEQ ID NO: 3930 - RNA, 19 nt, synthetic construct
  source 1..19: mol_type = other RNA
gcggggggctgaccccccc

SEQ ID NO: 3931 - RNA, 19 nt, synthetic construct
  source 1..19: mol_type = other RNA
ggcggggggctgacccccc

SEQ ID NO: 3932 - RNA, 19 nt, synthetic construct
  source 1..19: mol_type = other RNA
gggcggggggctgaccccc

SEQ ID NO: 3933 - RNA, 19 nt, synthetic construct
  source 1..19: mol_type = other RNA
cgggcggggggctgacccc

SEQ ID NO: 3934 - RNA, 19 nt, synthetic construct
  source 1..19: mol_type = other RNA
ccgggcggggggctgaccc

SEQ ID NO: 3935 - RNA, 19 nt, synthetic construct
  source 1..19: mol_type = other RNA
gccgggcggggggctgacc

SEQ ID NO: 3936 - RNA, 19 nt, synthetic construct
  source 1..19: mol_type = other RNA
ggccgggcggggggctgac

SEQ ID NO: 3937 - RNA, 19 nt, synthetic construct
  source 1..19: mol_type = other RNA
tggccgggcggggggctga

SEQ ID NO: 3938 - RNA, 19 nt, synthetic construct
  source 1..19: mol_type = other RNA
ctggccgggcggggggctg

SEQ ID NO: 3939 - RNA, 19 nt, synthetic construct
  source 1..19: mol_type = other RNA
gctggccgggcggggggct

SEQ ID NO: 3940 - RNA, 19 nt, synthetic construct
  source 1..19: mol_type = other RNA
ggctggccgggcggggggc

SEQ ID NO: 3941 - RNA, 19 nt, synthetic construct
  source 1..19: mol_type = other RNA
cggctggccgggcgggggg

SEQ ID NO: 3942 - RNA, 19 nt, synthetic construct
  source 1..19: mol_type = other RNA
gcggctggccgggcggggg

SEQ ID NO: 3943 - RNA, 19 nt, synthetic construct
  source 1..19: mol_type = other RNA
ggcggctggccgggcgggg

SEQ ID NO: 3944 - RNA, 19 nt, synthetic construct
  source 1..19: mol_type = other RNA
gggcggctggccgggcggg

SEQ ID NO: 3945 - RNA, 19 nt, synthetic construct
  source 1..19: mol_type = other RNA
ggggcggctggccgggcgg

SEQ ID NO: 3946 - RNA, 19 nt, synthetic construct
  source 1..19: mol_type = other RNA
cggggcggctggccgggcg

SEQ ID NO: 3947 - RNA, 19 nt, synthetic construct
  source 1..19: mol_type = other RNA
acggggcggctggccgggc

SEQ ID NO: 3948 - RNA, 19 nt, synthetic construct
  source 1..19: mol_type = other RNA
gacggggcggctggccggg

SEQ ID NO: 3949 - RNA, 19 nt, synthetic construct
  source 1..19: mol_type = other RNA
ggacggggcggctggccgg

SEQ ID NO: 3950 - RNA, 19 nt, synthetic construct
  source 1..19: mol_type = other RNA
cggacggggcggctggccg

SEQ ID NO: 3951 - RNA, 19 nt, synthetic construct
  source 1..19: mol_type = other RNA
ccggacggggcggctggcc

SEQ ID NO: 3952 - RNA, 19 nt, synthetic construct
  source 1..19: mol_type = other RNA
cccggacggggcggctggc

SEQ ID NO: 3953 - RNA, 19 nt, synthetic construct
  source 1..19: mol_type = other RNA
tcccggacggggcggctgg

SEQ ID NO: 3954 - RNA, 19 nt, synthetic construct
  source 1..19: mol_type = other RNA
ctcccggacggggcggctg

SEQ ID NO: 3955 - RNA, 19 nt, synthetic construct
  source 1..19: mol_type = other RNA
cctcccggacggggcggct

SEQ ID NO: 3956 - RNA, 19 nt, synthetic construct
  source 1..19: mol_type = other RNA
acctcccggacggggcggc

SEQ ID NO: 3957 - RNA, 19 nt, synthetic construct
  source 1..19: mol_type = other RNA
cacctcccggacggggcgg

SEQ ID NO: 3958 - RNA, 19 nt, synthetic construct
  source 1..19: mol_type = other RNA
tcacctcccggacggggcg

SEQ ID NO: 3959 - RNA, 19 nt, synthetic construct
  source 1..19: mol_type = other RNA
ctcacctcccggacggggc

SEQ ID NO: 3960 - RNA, 19 nt, synthetic construct
  source 1..19: mol_type = other RNA
cctcacctcccggacgggg

SEQ ID NO: 3961 - RNA, 19 nt, synthetic construct
  source 1..19: mol_type = other RNA
ccctcacctcccggacggg

SEQ ID NO: 3962 - RNA, 19 nt, synthetic construct
  source 1..19: mol_type = other RNA
cccctcacctcccggacgg

SEQ ID NO: 3963 - RNA, 19 nt, synthetic construct
  source 1..19: mol_type = other RNA
gcccctcacctcccggacg

SEQ ID NO: 3964 - RNA, 19 nt, synthetic construct
  source 1..19: mol_type = other RNA
cgcccctcacctcccggac

SEQ ID NO: 3965 - RNA, 19 nt, synthetic construct
  source 1..19: mol_type = other RNA
gcgcccctcacctcccgga

SEQ ID NO: 3966 - RNA, 19 nt, synthetic construct
  source 1..19: mol_type = other RNA
ggcgcccctcacctcccgg

SEQ ID NO: 3967 - RNA, 19 nt, synthetic construct
  source 1..19: mol_type = other RNA
aggcgcccctcacctcccg

SEQ ID NO: 3968 - RNA, 19 nt, synthetic construct
  source 1..19: mol_type = other RNA
gaggcgcccctcacctccc

SEQ ID NO: 3969 - RNA, 19 nt, synthetic construct
  source 1..19: mol_type = other RNA
agaggcgcccctcacctcc

SEQ ID NO: 3970 - RNA, 19 nt, synthetic construct
  source 1..19: mol_type = other RNA
cagaggcgcccctcacctc

SEQ ID NO: 3971 - RNA, 19 nt, synthetic construct
  source 1..19: mol_type = other RNA
gcagaggcgcccctcacct

SEQ ID NO: 3972 - RNA, 19 nt, synthetic construct
  source 1..19: mol_type = other RNA
ggcagaggcgcccctcacc

SEQ ID NO: 3973 - RNA, 19 nt, synthetic construct
  source 1..19: mol_type = other RNA
gggcagaggcgcccctcac

SEQ ID NO: 3974 - RNA, 19 nt, synthetic construct
  source 1..19: mol_type = other RNA
tgggcagaggcgcccctca

SEQ ID NO: 3975 - RNA, 19 nt, synthetic construct
  source 1..19: mol_type = other RNA
ctgggcagaggcgcccctc

SEQ ID NO: 3976 - RNA, 19 nt, synthetic construct
  source 1..19: mol_type = other RNA
gctgggcagaggcgcccct

SEQ ID NO: 3977 - RNA, 19 nt, synthetic construct
  source 1..19: mol_type = other RNA
ggctgggcagaggcgcccc

SEQ ID NO: 3978 - RNA, 19 nt, synthetic construct
  source 1..19: mol_type = other RNA
cggctgggcagaggcgccc

SEQ ID NO: 3979 - RNA, 19 nt, synthetic construct
  source 1..19: mol_type = other RNA
gcggctgggcagaggcgcc

SEQ ID NO: 3980 - RNA, 19 nt, synthetic construct
  source 1..19: mol_type = other RNA
ggcggctgggcagaggcgc

SEQ ID NO: 3981 - RNA, 19 nt, synthetic construct
  source 1..19: mol_type = other RNA
gggcggctgggcagaggcg

SEQ ID NO: 3982 - RNA, 19 nt, synthetic construct
  source 1..19: mol_type = other RNA
ggggcggctgggcagaggc

SEQ ID NO: 3983 - RNA, 19 nt, synthetic construct
  source 1..19: mol_type = other RNA
aggggcggctgggcagagg

SEQ ID NO: 3984 - RNA, 19 nt, synthetic construct
  source 1..19: mol_type = other RNA
taggggcggctgggcagag

SEQ ID NO: 3985 - RNA, 19 nt, synthetic construct
  source 1..19: mol_type = other RNA
gtaggggcggctgggcaga

SEQ ID NO: 3986 - RNA, 19 nt, synthetic construct
  source 1..19: mol_type = other RNA
agtaggggcggctgggcag

SEQ ID NO: 3987 - RNA, 19 nt, synthetic construct
  source 1..19: mol_type = other RNA
cagtaggggcggctgggca

SEQ ID NO: 3988 - RNA, 19 nt, synthetic construct
  source 1..19: mol_type = other RNA
ccagtaggggcggctgggc

SEQ ID NO: 3989 - RNA, 19 nt, synthetic construct
  source 1..19: mol_type = other RNA
cccagtaggggcggctggg

SEQ ID NO: 3990 - RNA, 19 nt, synthetic construct
  source 1..19: mol_type = other RNA
tcccagtaggggcggctgg

SEQ ID NO: 3991 - RNA, 19 nt, synthetic construct
  source 1..19: mol_type = other RNA
ttcccagtaggggcggctg

SEQ ID NO: 3992 - RNA, 19 nt, synthetic construct
  source 1..19: mol_type = other RNA
cttcccagtaggggcggct

SEQ ID NO: 3993 - RNA, 19 nt, synthetic construct
  source 1..19: mol_type = other RNA
acttcccagtaggggcggc

SEQ ID NO: 3994 - RNA, 19 nt, synthetic construct
  source 1..19: mol_type = other RNA
cacttcccagtaggggcgg

SEQ ID NO: 3995 - RNA, 19 nt, synthetic construct
  source 1..19: mol_type = other RNA
tcacttcccagtaggggcg

SEQ ID NO: 3996 - RNA, 19 nt, synthetic construct
  source 1..19: mol_type = other RNA
ctcacttcccagtaggggc

SEQ ID NO: 3997 - RNA, 19 nt, synthetic construct
  source 1..19: mol_type = other RNA
cctcacttcccagtagggg

SEQ ID NO: 3998 - RNA, 19 nt, synthetic construct
  source 1..19: mol_type = other RNA
tcctcacttcccagtaggg

SEQ ID NO: 3999 - RNA, 19 nt, synthetic construct
  source 1..19: mol_type = other RNA
ctcctcacttcccagtagg

SEQ ID NO: 4000 - RNA, 19 nt, synthetic construct
  source 1..19: mol_type = other RNA
gctcctcacttcccagtag

SEQ ID NO: 4001 - RNA, 19 nt, synthetic construct
  source 1..19: mol_type = other RNA
ggctcctcacttcccagta

SEQ ID NO: 4002 - RNA, 19 nt, synthetic construct
  source 1..19: mol_type = other RNA
gggctcctcacttcccagt

SEQ ID NO: 4003 - RNA, 19 nt, synthetic construct
  source 1..19: mol_type = other RNA
ggggctcctcacttcccag

SEQ ID NO: 4004 - RNA, 19 nt, synthetic construct
  source 1..19: mol_type = other RNA
aggggctcctcacttccca

SEQ ID NO: 4005 - RNA, 19 nt, synthetic construct
  source 1..19: mol_type = other RNA
gaggggctcctcacttccc

SEQ ID NO: 4006 - RNA, 19 nt, synthetic construct
  source 1..19: mol_type = other RNA
agaggggctcctcacttcc

SEQ ID NO: 4007 - RNA, 19 nt, synthetic construct
  source 1..19: mol_type = other RNA
tagaggggctcctcacttc

SEQ ID NO: 4008 - RNA, 19 nt, synthetic construct
  source 1..19: mol_type = other RNA
gtagaggggctcctcactt

SEQ ID NO: 4009 - RNA, 19 nt, synthetic construct
  source 1..19: mol_type = other RNA
ggtagaggggctcctcact

SEQ ID NO: 4010 - RNA, 19 nt, synthetic construct
  source 1..19: mol_type = other RNA
gggtagaggggctcctcac

SEQ ID NO: 4011 - RNA, 19 nt, synthetic construct
  source 1..19: mol_type = other RNA
cgggtagaggggctcctca

SEQ ID NO: 4012 - RNA, 19 nt, synthetic construct
  source 1..19: mol_type = other RNA
ccgggtagaggggctcctc

SEQ ID NO: 4013 - RNA, 19 nt, synthetic construct
  source 1..19: mol_type = other RNA
gccgggtagaggggctcct

SEQ ID NO: 4014 - RNA, 19 nt, synthetic construct
  source 1..19: mol_type = other RNA
ggccgggtagaggggctcc

SEQ ID NO: 4015 - RNA, 19 nt, synthetic construct
  source 1..19: mol_type = other RNA
tggccgggtagaggggctc

SEQ ID NO: 4016 - RNA, 19 nt, synthetic construct
  source 1..19: mol_type = other RNA
ctggccgggtagaggggct

SEQ ID NO: 4017 - RNA, 19 nt, synthetic construct
  source 1..19: mol_type = other RNA
gctggccgggtagaggggc

SEQ ID NO: 4018 - RNA, 19 nt, synthetic construct
  source 1..19: mol_type = other RNA
ggctggccgggtagagggg

SEQ ID NO: 4019 - RNA, 19 nt, synthetic construct
  source 1..19: mol_type = other RNA
cggctggccgggtagaggg

SEQ ID NO: 4020 - RNA, 19 nt, synthetic construct
  source 1..19: mol_type = other RNA
gcggctggccgggtagagg

SEQ ID NO: 4021 - RNA, 19 nt, synthetic construct
  source 1..19: mol_type = other RNA
agcggctggccgggtagag

SEQ ID NO: 4022 - RNA, 19 nt, synthetic construct
  source 1..19: mol_type = other RNA
gagcggctggccgggtaga

SEQ ID NO: 4023 - RNA, 19 nt, synthetic construct
  source 1..19: mol_type = other RNA
ggagcggctggccgggtag

SEQ ID NO: 4024 - RNA, 19 nt, synthetic construct
  source 1..19: mol_type = other RNA
cggagcggctggccgggta

SEQ ID NO: 4025 - RNA, 19 nt, synthetic construct
  source 1..19: mol_type = other RNA
acggagcggctggccgggt

SEQ ID NO: 4026 - RNA, 19 nt, synthetic construct
  source 1..19: mol_type = other RNA
gacggagcggctggccggg

SEQ ID NO: 4027 - RNA, 19 nt, synthetic construct
  source 1..19: mol_type = other RNA
ggacggagcggctggccgg

SEQ ID NO: 4028 - RNA, 19 nt, synthetic construct
  source 1..19: mol_type = other RNA
cggacggagcggctggccg

SEQ ID NO: 4029 - RNA, 19 nt, synthetic construct
  source 1..19: mol_type = other RNA
ccggacggagcggctggcc

SEQ ID NO: 4030 - RNA, 19 nt, synthetic construct
  source 1..19: mol_type = other RNA
cccggacggagcggctggc

SEQ ID NO: 4031 - RNA, 19 nt, synthetic construct
  source 1..19: mol_type = other RNA
tcccggacggagcggctgg

SEQ ID NO: 4032 - RNA, 19 nt, synthetic construct
  source 1..19: mol_type = other RNA
ctcccggacggagcggctg

SEQ ID NO: 4033 - RNA, 19 nt, synthetic construct
  source 1..19: mol_type = other RNA
cctcccggacggagcggct

SEQ ID NO: 4034 - RNA, 19 nt, synthetic construct
  source 1..19: mol_type = other RNA
ccctcccggacggagcggc

SEQ ID NO: 4035 - RNA, 19 nt, synthetic construct
  source 1..19: mol_type = other RNA
tccctcccggacggagcgg

SEQ ID NO: 4036 - RNA, 19 nt, synthetic construct
  source 1..19: mol_type = other RNA
ctccctcccggacggagcg

SEQ ID NO: 4037 - RNA, 19 nt, synthetic construct
  source 1..19: mol_type = other RNA
cctccctcccggacggagc

SEQ ID NO: 4038 - RNA, 19 nt, synthetic construct
  source 1..19: mol_type = other RNA
acctccctcccggacggag

SEQ ID NO: 4039 - RNA, 19 nt, synthetic construct
  source 1..19: mol_type = other RNA
cacctccctcccggacgga

SEQ ID NO: 4040 - RNA, 19 nt, synthetic construct
  source 1..19: mol_type = other RNA
ccacctccctcccggacgg

SEQ ID NO: 4041 - RNA, 19 nt, synthetic construct
  source 1..19: mol_type = other RNA
cccacctccctcccggacg

SEQ ID NO: 4042 - RNA, 19 nt, synthetic construct
  source 1..19: mol_type = other RNA
ccccacctccctcccggac

SEQ ID NO: 4043 - RNA, 19 nt, synthetic construct
  source 1..19: mol_type = other RNA
cccccacctccctcccgga

SEQ ID NO: 4044 - RNA, 19 nt, synthetic construct
  source 1..19: mol_type = other RNA
ccccccacctccctcccgg

SEQ ID NO: 4045 - RNA, 19 nt, synthetic construct
  source 1..19: mol_type = other RNA
cccccccacctccctcccg

SEQ ID NO: 4046 - RNA, 19 nt, synthetic construct
  source 1..19: mol_type = other RNA
acccccccacctccctccc

SEQ ID NO: 4047 - RNA, 19 nt, synthetic construct
  source 1..19: mol_type = other RNA
gacccccccacctccctcc

SEQ ID NO: 4048 - RNA, 19 nt, synthetic construct
  source 1..19: mol_type = other RNA
tgacccccccacctccctc

SEQ ID NO: 4049 - RNA, 19 nt, synthetic construct
  source 1..19: mol_type = other RNA
ctgacccccccacctccct

SEQ ID NO: 4050 - RNA, 19 nt, synthetic construct
  source 1..19: mol_type = other RNA
tctgacccccccacctccc

SEQ ID NO: 4051 - RNA, 19 nt, synthetic construct
  source 1..19: mol_type = other RNA
gtctgacccccccacctcc

SEQ ID NO: 4052 - RNA, 19 nt, synthetic construct
  source 1..19: mol_type = other RNA
ggtctgacccccccacctc

SEQ ID NO: 4053 - RNA, 19 nt, synthetic construct
  source 1..19: mol_type = other RNA
gggtctgacccccccacct

SEQ ID NO: 4054 - RNA, 19 nt, synthetic construct
  source 1..19: mol_type = other RNA
ggggtctgacccccccacc

SEQ ID NO: 4055 - RNA, 19 nt, synthetic construct
  source 1..19: mol_type = other RNA
cggggtctgacccccccac

SEQ ID NO: 4056 - RNA, 19 nt, synthetic construct
  source 1..19: mol_type = other RNA
gcggggtctgaccccccca

SEQ ID NO: 4057 - RNA, 19 nt, synthetic construct
  source 1..19: mol_type = other RNA
ggcggggtctgaccccccc

SEQ ID NO: 4058 - RNA, 19 nt, synthetic construct
  source 1..19: mol_type = other RNA
gggcggggtctgacccccc

SEQ ID NO: 4059 - RNA, 19 nt, synthetic construct
  source 1..19: mol_type = other RNA
cgggcggggtctgaccccc

SEQ ID NO: 4060 - RNA, 19 nt, synthetic construct
  source 1..19: mol_type = other RNA
ccgggcggggtctgacccc

SEQ ID NO: 4061 - RNA, 19 nt, synthetic construct
  source 1..19: mol_type = other RNA
gccgggcggggtctgaccc

SEQ ID NO: 4062 - RNA, 19 nt, synthetic construct
  source 1..19: mol_type = other RNA
ggccgggcggggtctgacc

SEQ ID NO: 4063 - RNA, 19 nt, synthetic construct
  source 1..19: mol_type = other RNA
tggccgggcggggtctgac

SEQ ID NO: 4064 - RNA, 19 nt, synthetic construct
  source 1..19: mol_type = other RNA
ctggccgggcggggtctga

SEQ ID NO: 4065 - RNA, 19 nt, synthetic construct
  source 1..19: mol_type = other RNA
gctggccgggcggggtctg

SEQ ID NO: 4066 - RNA, 19 nt, synthetic construct
  source 1..19: mol_type = other RNA
ggctggccgggcggggtct

SEQ ID NO: 4067 - RNA, 19 nt, synthetic construct
  source 1..19: mol_type = other RNA
cggctggccgggcggggtc

SEQ ID NO: 4068 - RNA, 19 nt, synthetic construct
  source 1..19: mol_type = other RNA
gcggctggccgggcggggt

SEQ ID NO: 4069 - RNA, 19 nt, synthetic construct
  source 1..19: mol_type = other RNA
ggcggctggccgggcgggg

SEQ ID NO: 4070 - RNA, 19 nt, synthetic construct
  source 1..19: mol_type = other RNA
gggcggctggccgggcggg

SEQ ID NO: 4071 - RNA, 19 nt, synthetic construct
  source 1..19: mol_type = other RNA
ggggcggctggccgggcgg

SEQ ID NO: 4072 - RNA, 19 nt, synthetic construct
  source 1..19: mol_type = other RNA
cggggcggctggccgggcg

SEQ ID NO: 4073 - RNA, 19 nt, synthetic construct
  source 1..19: mol_type = other RNA
acggggcggctggccgggc

SEQ ID NO: 4074 - RNA, 19 nt, synthetic construct
  source 1..19: mol_type = other RNA
gacggggcggctggccggg

SEQ ID NO: 4075 - RNA, 19 nt, synthetic construct
  source 1..19: mol_type = other RNA
ggacggggcggctggccgg

SEQ ID NO: 4076 - RNA, 19 nt, synthetic construct
  source 1..19: mol_type = other RNA
cggacggggcggctggccg

SEQ ID NO: 4077 - RNA, 19 nt, synthetic construct
  source 1..19: mol_type = other RNA
ccggacggggcggctggcc

SEQ ID NO: 4078 - RNA, 19 nt, synthetic construct
  source 1..19: mol_type = other RNA
cccggacggggcggctggc

SEQ ID NO: 4079 - RNA, 19 nt, synthetic construct
  source 1..19: mol_type = other RNA
tcccggacggggcggctgg

SEQ ID NO: 4080 - RNA, 19 nt, synthetic construct
  source 1..19: mol_type = other RNA
ctcccggacggggcggctg

SEQ ID NO: 4081 - RNA, 19 nt, synthetic construct
  source 1..19: mol_type = other RNA
cctcccggacggggcggct

SEQ ID NO: 4082 - RNA, 19 nt, synthetic construct
  source 1..19: mol_type = other RNA
ccctcccggacggggcggc

SEQ ID NO: 4083 - RNA, 19 nt, synthetic construct
  source 1..19: mol_type = other RNA
tccctcccggacggggcgg

SEQ ID NO: 4084 - RNA, 19 nt, synthetic construct
  source 1..19: mol_type = other RNA
ctccctcccggacggggcg

SEQ ID NO: 4085 - RNA, 19 nt, synthetic construct
  source 1..19: mol_type = other RNA
cctccctcccggacggggc

SEQ ID NO: 4086 - RNA, 19 nt, synthetic construct
  source 1..19: mol_type = other RNA
acctccctcccggacgggg

SEQ ID NO: 4087 - RNA, 19 nt, synthetic construct
  source 1..19: mol_type = other RNA
cacctccctcccggacggg

SEQ ID NO: 4088 - RNA, 19 nt, synthetic construct
  source 1..19: mol_type = other RNA
ccacctccctcccggacgg

SEQ ID NO: 4089 - RNA, 19 nt, synthetic construct
  source 1..19: mol_type = other RNA
cccacctccctcccggacg

SEQ ID NO: 4090 - RNA, 19 nt, synthetic construct
  source 1..19: mol_type = other RNA
ccccacctccctcccggac

SEQ ID NO: 4091 - RNA, 19 nt, synthetic construct
  source 1..19: mol_type = other RNA
cccccacctccctcccgga

SEQ ID NO: 4092 - RNA, 19 nt, synthetic construct
  source 1..19: mol_type = other RNA
ccccccacctccctcccgg

SEQ ID NO: 4093 - RNA, 19 nt, synthetic construct
  source 1..19: mol_type = other RNA
accccccacctccctcccg

SEQ ID NO: 4094 - RNA, 19 nt, synthetic construct
  source 1..19: mol_type = other RNA
aaccccccacctccctccc

SEQ ID NO: 4095 - RNA, 19 nt, synthetic construct
  source 1..19: mol_type = other RNA
gaaccccccacctccctcc

SEQ ID NO: 4096 - RNA, 19 nt, synthetic construct
  source 1..19: mol_type = other RNA
tgaaccccccacctccctc

SEQ ID NO: 4097 - RNA, 19 nt, synthetic construct
  source 1..19: mol_type = other RNA
ctgaaccccccacctccct

SEQ ID NO: 4098 - RNA, 19 nt, synthetic construct
  source 1..19: mol_type = other RNA
gctgaaccccccacctccc

SEQ ID NO: 4099 - RNA, 19 nt, synthetic construct
  source 1..19: mol_type = other RNA
ggctgaaccccccacctcc

SEQ ID NO: 4100 - RNA, 19 nt, synthetic construct
  source 1..19: mol_type = other RNA
gggctgaaccccccacctc

SEQ ID NO: 4101 - RNA, 19 nt, synthetic construct
  source 1..19: mol_type = other RNA
ggggctgaaccccccacct

SEQ ID NO: 4102 - RNA, 19 nt, synthetic construct
  source 1..19: mol_type = other RNA
gggggctgaaccccccacc

SEQ ID NO: 4103 - RNA, 19 nt, synthetic construct
  source 1..19: mol_type = other RNA
ggggggctgaaccccccac

SEQ ID NO: 4104 - RNA, 19 nt, synthetic construct
  source 1..19: mol_type = other RNA
tggggggctgaacccccca

SEQ ID NO: 4105 - RNA, 19 nt, synthetic construct
  source 1..19: mol_type = other RNA
gtggggggctgaacccccc

SEQ ID NO: 4106 - RNA, 19 nt, synthetic construct
  source 1..19: mol_type = other RNA
ggtggggggctgaaccccc

SEQ ID NO: 4107 - RNA, 19 nt, synthetic construct
  source 1..19: mol_type = other RNA
gggtggggggctgaacccc

SEQ ID NO: 4108 - RNA, 19 nt, synthetic construct
  source 1..19: mol_type = other RNA
cgggtggggggctgaaccc

SEQ ID NO: 4109 - RNA, 19 nt, synthetic construct
  source 1..19: mol_type = other RNA
ccgggtggggggctgaacc

SEQ ID NO: 4110 - RNA, 19 nt, synthetic construct
  source 1..19: mol_type = other RNA
gccgggtggggggctgaac

SEQ ID NO: 4111 - RNA, 19 nt, synthetic construct
  source 1..19: mol_type = other RNA
ggccgggtggggggctgaa

SEQ ID NO: 4112 - RNA, 19 nt, synthetic construct
  source 1..19: mol_type = other RNA
tggccgggtggggggctga

SEQ ID NO: 4113 - RNA, 19 nt, synthetic construct
  source 1..19: mol_type = other RNA
ctggccgggtggggggctg

SEQ ID NO: 4114 - RNA, 19 nt, synthetic construct
  source 1..19: mol_type = other RNA
gctggccgggtggggggct

SEQ ID NO: 4115 - RNA, 19 nt, synthetic construct
  source 1..19: mol_type = other RNA
ggctggccgggtggggggc

SEQ ID NO: 4116 - RNA, 19 nt, synthetic construct
  source 1..19: mol_type = other RNA
tggctggccgggtgggggg

SEQ ID NO: 4117 - RNA, 19 nt, synthetic construct
  source 1..19: mol_type = other RNA
gtggctggccgggtggggg

SEQ ID NO: 4118 - RNA, 19 nt, synthetic construct
  source 1..19: mol_type = other RNA
ggtggctggccgggtgggg

SEQ ID NO: 4119 - RNA, 19 nt, synthetic construct
  source 1..19: mol_type = other RNA
tggtggctggccgggtggg

SEQ ID NO: 4120 - RNA, 19 nt, synthetic construct
  source 1..19: mol_type = other RNA
gtggtggctggccgggtgg

SEQ ID NO: 4121 - RNA, 19 nt, synthetic construct
  source 1..19: mol_type = other RNA
cgtggtggctggccgggtg

SEQ ID NO: 4122 - RNA, 19 nt, synthetic construct
  source 1..19: mol_type = other RNA
acgtggtggctggccgggt

SEQ ID NO: 4123 - RNA, 19 nt, synthetic construct
  source 1..19: mol_type = other RNA
gacgtggtggctggccggg

SEQ ID NO: 4124 - RNA, 19 nt, synthetic construct
  source 1..19: mol_type = other RNA
agacgtggtggctggccgg

SEQ ID NO: 4125 - RNA, 19 nt, synthetic construct
  source 1..19: mol_type = other RNA
cagacgtggtggctggccg

SEQ ID NO: 4126 - RNA, 19 nt, synthetic construct
  source 1..19: mol_type = other RNA
ccagacgtggtggctggcc

SEQ ID NO: 4127 - RNA, 19 nt, synthetic construct
  source 1..19: mol_type = other RNA
cccagacgtggtggctggc

SEQ ID NO: 4128 - RNA, 19 nt, synthetic construct
  source 1..19: mol_type = other RNA
tcccagacgtggtggctgg

SEQ ID NO: 4129 - RNA, 19 nt, synthetic construct
  source 1..19: mol_type = other RNA
ctcccagacgtggtggctg

SEQ ID NO: 4130 - RNA, 19 nt, synthetic construct
  source 1..19: mol_type = other RNA
cctcccagacgtggtggct

SEQ ID NO: 4131 - RNA, 19 nt, synthetic construct
  source 1..19: mol_type = other RNA
ccctcccagacgtggtggc

SEQ ID NO: 4132 - RNA, 19 nt, synthetic construct
  source 1..19: mol_type = other RNA
tccctcccagacgtggtgg

SEQ ID NO: 4133 - RNA, 19 nt, synthetic construct
  source 1..19: mol_type = other RNA
ctccctcccagacgtggtg

SEQ ID NO: 4134 - RNA, 19 nt, synthetic construct
  source 1..19: mol_type = other RNA
cctccctcccagacgtggt

SEQ ID NO: 4135 - RNA, 19 nt, synthetic construct
  source 1..19: mol_type = other RNA
acctccctcccagacgtgg

SEQ ID NO: 4136 - RNA, 19 nt, synthetic construct
  source 1..19: mol_type = other RNA
cacctccctcccagacgtg

SEQ ID NO: 4137 - RNA, 19 nt, synthetic construct
  source 1..19: mol_type = other RNA
ccacctccctcccagacgt

SEQ ID NO: 4138 - RNA, 19 nt, synthetic construct
  source 1..19: mol_type = other RNA
cccacctccctcccagacg

SEQ ID NO: 4139 - RNA, 19 nt, synthetic construct
  source 1..19: mol_type = other RNA
ccccacctccctcccagac

SEQ ID NO: 4140 - RNA, 19 nt, synthetic construct
  source 1..19: mol_type = other RNA
cccccacctccctcccaga

SEQ ID NO: 4141 - RNA, 19 nt, synthetic construct
  source 1..19: mol_type = other RNA
ccccccacctccctcccag

SEQ ID NO: 4142 - RNA, 19 nt, synthetic construct
  source 1..19: mol_type = other RNA
cccccccacctccctccca

SEQ ID NO: 4143 - RNA, 19 nt, synthetic construct
  source 1..19: mol_type = other RNA
acccccccacctccctccc

SEQ ID NO: 4144 - RNA, 19 nt, synthetic construct
  source 1..19: mol_type = other RNA
gacccccccacctccctcc

SEQ ID NO: 4145 - RNA, 19 nt, synthetic construct
  source 1..19: mol_type = other RNA
tgacccccccacctccctc

SEQ ID NO: 4146 - RNA, 19 nt, synthetic construct
  source 1..19: mol_type = other RNA
ctgacccccccacctccct

SEQ ID NO: 4147 - RNA, 19 nt, synthetic construct
  source 1..19: mol_type = other RNA
gctgacccccccacctccc

SEQ ID NO: 4148 - RNA, 19 nt, synthetic construct
  source 1..19: mol_type = other RNA
ggctgacccccccacctcc

SEQ ID NO: 4149 - RNA, 19 nt, synthetic construct
  source 1..19: mol_type = other RNA
gggctgacccccccacctc

SEQ ID NO: 4150 - RNA, 19 nt, synthetic construct
  source 1..19: mol_type = other RNA
agggctgacccccccacct

SEQ ID NO: 4151 - RNA, 19 nt, synthetic construct
  source 1..19: mol_type = other RNA
gagggctgacccccccacc

SEQ ID NO: 4152 - RNA, 19 nt, synthetic construct
  source 1..19: mol_type = other RNA
agagggctgacccccccac

SEQ ID NO: 4153 - RNA, 19 nt, synthetic construct
  source 1..19: mol_type = other RNA
cagagggctgaccccccca

SEQ ID NO: 4154 - RNA, 19 nt, synthetic construct
  source 1..19: mol_type = other RNA
gcagagggctgaccccccc

SEQ ID NO: 4155 - RNA, 19 nt, synthetic construct
  source 1..19: mol_type = other RNA
ggcagagggctgacccccc

SEQ ID NO: 4156 - RNA, 19 nt, synthetic construct
  source 1..19: mol_type = other RNA
gggcagagggctgaccccc

SEQ ID NO: 4157 - RNA, 19 nt, synthetic construct
  source 1..19: mol_type = other RNA
cgggcagagggctgacccc

SEQ ID NO: 4158 - RNA, 19 nt, synthetic construct
  source 1..19: mol_type = other RNA
ccgggcagagggctgaccc

SEQ ID NO: 4159 - RNA, 19 nt, synthetic construct
  source 1..19: mol_type = other RNA
gccgggcagagggctgacc

SEQ ID NO: 4160 - RNA, 19 nt, synthetic construct
  source 1..19: mol_type = other RNA
ggccgggcagagggctgac

SEQ ID NO: 4161 - RNA, 19 nt, synthetic construct
  source 1..19: mol_type = other RNA
tggccgggcagagggctga

SEQ ID NO: 4162 - RNA, 19 nt, synthetic construct
  source 1..19: mol_type = other RNA
ctggccgggcagagggctg

SEQ ID NO: 4163 - RNA, 19 nt, synthetic construct
  source 1..19: mol_type = other RNA
gctggccgggcagagggct

SEQ ID NO: 4164 - RNA, 19 nt, synthetic construct
  source 1..19: mol_type = other RNA
ggctggccgggcagagggc

SEQ ID NO: 4165 - RNA, 19 nt, synthetic construct
  source 1..19: mol_type = other RNA
cggctggccgggcagaggg

SEQ ID NO: 4166 - RNA, 19 nt, synthetic construct
  source 1..19: mol_type = other RNA
gcggctggccgggcagagg

SEQ ID NO: 4167 - RNA, 19 nt, synthetic construct
  source 1..19: mol_type = other RNA
ggcggctggccgggcagag

SEQ ID NO: 4168 - RNA, 19 nt, synthetic construct
  source 1..19: mol_type = other RNA
gggcggctggccgggcaga

SEQ ID NO: 4169 - RNA, 19 nt, synthetic construct
  source 1..19: mol_type = other RNA
ggggcggctggccgggcag

SEQ ID NO: 4170 - RNA, 19 nt, synthetic construct
  source 1..19: mol_type = other RNA
cggggcggctggccgggca

SEQ ID NO: 4171 - RNA, 19 nt, synthetic construct
  source 1..19: mol_type = other RNA
acggggcggctggccgggc

SEQ ID NO: 4172 - RNA, 19 nt, synthetic construct
  source 1..19: mol_type = other RNA
gacggggcggctggccggg

SEQ ID NO: 4173 - RNA, 19 nt, synthetic construct
  source 1..19: mol_type = other RNA
ggacggggcggctggccgg

SEQ ID NO: 4174 - RNA, 19 nt, synthetic construct
  source 1..19: mol_type = other RNA
cggacggggcggctggccg

SEQ ID NO: 4175 - RNA, 19 nt, synthetic construct
  source 1..19: mol_type = other RNA
ccggacggggcggctggcc

SEQ ID NO: 4176 - RNA, 19 nt, synthetic construct
  source 1..19: mol_type = other RNA
cccggacggggcggctggc

SEQ ID NO: 4177 - RNA, 19 nt, synthetic construct
  source 1..19: mol_type = other RNA
tcccggacggggcggctgg

SEQ ID NO: 4178 - RNA, 19 nt, synthetic construct
  source 1..19: mol_type = other RNA
ctcccggacggggcggctg

SEQ ID NO: 4179 - RNA, 19 nt, synthetic construct
  source 1..19: mol_type = other RNA
cctcccggacggggcggct

SEQ ID NO: 4180 - RNA, 19 nt, synthetic construct
  source 1..19: mol_type = other RNA
ccctcccggacggggcggc

SEQ ID NO: 4181 - RNA, 19 nt, synthetic construct
  source 1..19: mol_type = other RNA
tccctcccggacggggcgg

SEQ ID NO: 4182 - RNA, 19 nt, synthetic construct
  source 1..19: mol_type = other RNA
ctccctcccggacggggcg

SEQ ID NO: 4183 - RNA, 19 nt, synthetic construct
  source 1..19: mol_type = other RNA
cctccctcccggacggggc

SEQ ID NO: 4184 - RNA, 19 nt, synthetic construct
  source 1..19: mol_type = other RNA
acctccctcccggacgggg

SEQ ID NO: 4185 - RNA, 19 nt, synthetic construct
  source 1..19: mol_type = other RNA
cacctccctcccggacggg

SEQ ID NO: 4186 - RNA, 19 nt, synthetic construct
  source 1..19: mol_type = other RNA
ccacctccctcccggacgg

SEQ ID NO: 4187 - RNA, 19 nt, synthetic construct
  source 1..19: mol_type = other RNA
cccacctccctcccggacg

SEQ ID NO: 4188 - RNA, 19 nt, synthetic construct
  source 1..19: mol_type = other RNA
ccccacctccctcccggac

SEQ ID NO: 4189 - RNA, 19 nt, synthetic construct
  source 1..19: mol_type = other RNA
cccccacctccctcccgga

SEQ ID NO: 4190 - RNA, 19 nt, synthetic construct
  source 1..19: mol_type = other RNA
ccccccacctccctcccgg

SEQ ID NO: 4191 - RNA, 19 nt, synthetic construct
  source 1..19: mol_type = other RNA
accccccacctccctcccg

SEQ ID NO: 4192 - RNA, 19 nt, synthetic construct
  source 1..19: mol_type = other RNA
aaccccccacctccctccc

SEQ ID NO: 4193 - RNA, 19 nt, synthetic construct
  source 1..19: mol_type = other RNA
gaaccccccacctccctcc

SEQ ID NO: 4194 - RNA, 19 nt, synthetic construct
  source 1..19: mol_type = other RNA
tgaaccccccacctccctc

SEQ ID NO: 4195 - RNA, 19 nt, synthetic construct
  source 1..19: mol_type = other RNA
ctgaaccccccacctccct

SEQ ID NO: 4196 - RNA, 19 nt, synthetic construct
  source 1..19: mol_type = other RNA
gctgaaccccccacctccc

SEQ ID NO: 4197 - RNA, 19 nt, synthetic construct
  source 1..19: mol_type = other RNA
ggctgaaccccccacctcc

SEQ ID NO: 4198 - RNA, 19 nt, synthetic construct
  source 1..19: mol_type = other RNA
gggctgaaccccccacctc

SEQ ID NO: 4199 - RNA, 19 nt, synthetic construct
  source 1..19: mol_type = other RNA
ggggctgaaccccccacct

SEQ ID NO: 4200 - RNA, 19 nt, synthetic construct
  source 1..19: mol_type = other RNA
gggggctgaaccccccacc

SEQ ID NO: 4201 - RNA, 19 nt, synthetic construct
  source 1..19: mol_type = other RNA
ggggggctgaaccccccac

SEQ ID NO: 4202 - RNA, 19 nt, synthetic construct
  source 1..19: mol_type = other RNA
tggggggctgaacccccca

SEQ ID NO: 4203 - RNA, 19 nt, synthetic construct
  source 1..19: mol_type = other RNA
gtggggggctgaacccccc

SEQ ID NO: 4204 - RNA, 19 nt, synthetic construct
  source 1..19: mol_type = other RNA
ggtggggggctgaaccccc

SEQ ID NO: 4205 - RNA, 19 nt, synthetic construct
  source 1..19: mol_type = other RNA
gggtggggggctgaacccc

SEQ ID NO: 4206 - RNA, 19 nt, synthetic construct
  source 1..19: mol_type = other RNA
cgggtggggggctgaaccc

SEQ ID NO: 4207 - RNA, 19 nt, synthetic construct
  source 1..19: mol_type = other RNA
ccgggtggggggctgaacc

SEQ ID NO: 4208 - RNA, 19 nt, synthetic construct
  source 1..19: mol_type = other RNA
gccgggtggggggctgaac

SEQ ID NO: 4209 - RNA, 19 nt, synthetic construct
  source 1..19: mol_type = other RNA
ggccgggtggggggctgaa

SEQ ID NO: 4210 - RNA, 19 nt, synthetic construct
  source 1..19: mol_type = other RNA
tggccgggtggggggctga

SEQ ID NO: 4211 - RNA, 19 nt, synthetic construct
  source 1..19: mol_type = other RNA
ctggccgggtggggggctg

SEQ ID NO: 4212 - RNA, 19 nt, synthetic construct
  source 1..19: mol_type = other RNA
gctggccgggtggggggct

SEQ ID NO: 4213 - RNA, 19 nt, synthetic construct
  source 1..19: mol_type = other RNA
ggctggccgggtggggggc

SEQ ID NO: 4214 - RNA, 19 nt, synthetic construct
  source 1..19: mol_type = other RNA
cggctggccgggtgggggg

SEQ ID NO: 4215 - RNA, 19 nt, synthetic construct
  source 1..19: mol_type = other RNA
gcggctggccgggtggggg

SEQ ID NO: 4216 - RNA, 19 nt, synthetic construct
  source 1..19: mol_type = other RNA
ggcggctggccgggtgggg

SEQ ID NO: 4217 - RNA, 19 nt, synthetic construct
  source 1..19: mol_type = other RNA
gggcggctggccgggtggg

SEQ ID NO: 4218 - RNA, 19 nt, synthetic construct
  source 1..19: mol_type = other RNA
ggggcggctggccgggtgg

SEQ ID NO: 4219 - RNA, 19 nt, synthetic construct
  source 1..19: mol_type = other RNA
cggggcggctggccgggtg

SEQ ID NO: 4220 - RNA, 19 nt, synthetic construct
  source 1..19: mol_type = other RNA
acggggcggctggccgggt

SEQ ID NO: 4221 - RNA, 19 nt, synthetic construct
  source 1..19: mol_type = other RNA
gacggggcggctggccggg

SEQ ID NO: 4222 - RNA, 19 nt, synthetic construct
  source 1..19: mol_type = other RNA
ggacggggcggctggccgg

SEQ ID NO: 4223 - RNA, 19 nt, synthetic construct
  source 1..19: mol_type = other RNA
cggacggggcggctggccg

SEQ ID NO: 4224 - RNA, 19 nt, synthetic construct
  source 1..19: mol_type = other RNA
ccggacggggcggctggcc

SEQ ID NO: 4225 - RNA, 19 nt, synthetic construct
  source 1..19: mol_type = other RNA
cccggacggggcggctggc

SEQ ID NO: 4226 - RNA, 19 nt, synthetic construct
  source 1..19: mol_type = other RNA
tcccggacggggcggctgg

SEQ ID NO: 4227 - RNA, 19 nt, synthetic construct
  source 1..19: mol_type = other RNA
ctcccggacggggcggctg

SEQ ID NO: 4228 - RNA, 19 nt, synthetic construct
  source 1..19: mol_type = other RNA
cctcccggacggggcggct

SEQ ID NO: 4229 - RNA, 19 nt, synthetic construct
  source 1..19: mol_type = other RNA
ccctcccggacggggcggc

SEQ ID NO: 4230 - RNA, 19 nt, synthetic construct
  source 1..19: mol_type = other RNA
tccctcccggacggggcgg

SEQ ID NO: 4231 - RNA, 19 nt, synthetic construct
  source 1..19: mol_type = other RNA
ctccctcccggacggggcg

SEQ ID NO: 4232 - RNA, 19 nt, synthetic construct
  source 1..19: mol_type = other RNA
cctccctcccggacggggc

SEQ ID NO: 4233 - RNA, 19 nt, synthetic construct
  source 1..19: mol_type = other RNA
acctccctcccggacgggg

SEQ ID NO: 4234 - RNA, 19 nt, synthetic construct
  source 1..19: mol_type = other RNA
cacctccctcccggacggg

SEQ ID NO: 4235 - RNA, 19 nt, synthetic construct
  source 1..19: mol_type = other RNA
ccacctccctcccggacgg

SEQ ID NO: 4236 - RNA, 19 nt, synthetic construct
  source 1..19: mol_type = other RNA
tccacctccctcccggacg

SEQ ID NO: 4237 - RNA, 19 nt, synthetic construct
  source 1..19: mol_type = other RNA
ctccacctccctcccggac

SEQ ID NO: 4238 - RNA, 19 nt, synthetic construct
  source 1..19: mol_type = other RNA
cctccacctccctcccgga

SEQ ID NO: 4239 - RNA, 19 nt, synthetic construct
  source 1..19: mol_type = other RNA
ccctccacctccctcccgg

SEQ ID NO: 4240 - RNA, 19 nt, synthetic construct
  source 1..19: mol_type = other RNA
cccctccacctccctcccg

SEQ ID NO: 4241 - RNA, 19 nt, synthetic construct
  source 1..19: mol_type = other RNA
acccctccacctccctccc

SEQ ID NO: 4242 - RNA, 19 nt, synthetic construct
  source 1..19: mol_type = other RNA
gacccctccacctccctcc

SEQ ID NO: 4243 - RNA, 19 nt, synthetic construct
  source 1..19: mol_type = other RNA
tgacccctccacctccctc

SEQ ID NO: 4244 - RNA, 19 nt, synthetic construct
  source 1..19: mol_type = other RNA
ctgacccctccacctccct

SEQ ID NO: 4245 - RNA, 19 nt, synthetic construct
  source 1..19: mol_type = other RNA
gctgacccctccacctccc

SEQ ID NO: 4246 - RNA, 19 nt, synthetic construct
  source 1..19: mol_type = other RNA
ggctgacccctccacctcc

SEQ ID NO: 4247 - RNA, 19 nt, synthetic construct
  source 1..19: mol_type = other RNA
gggctgacccctccacctc

SEQ ID NO: 4248 - RNA, 19 nt, synthetic construct
  source 1..19: mol_type = other RNA
ggggctgacccctccacct

SEQ ID NO: 4249 - RNA, 19 nt, synthetic construct
  source 1..19: mol_type = other RNA
gggggctgacccctccacc

SEQ ID NO: 4250 - RNA, 19 nt, synthetic construct
  source 1..19: mol_type = other RNA
ggggggctgacccctccac

SEQ ID NO: 4251 - RNA, 19 nt, synthetic construct
  source 1..19: mol_type = other RNA
cggggggctgacccctcca

SEQ ID NO: 4252 - RNA, 19 nt, synthetic construct
  source 1..19: mol_type = other RNA
gcggggggctgacccctcc

SEQ ID NO: 4253 - RNA, 19 nt, synthetic construct
  source 1..19: mol_type = other RNA
ggcggggggctgacccctc

SEQ ID NO: 4254 - RNA, 19 nt, synthetic construct
  source 1..19: mol_type = other RNA
gggcggggggctgacccct

SEQ ID NO: 4255 - RNA, 19 nt, synthetic construct
  source 1..19: mol_type = other RNA
cgggcggggggctgacccc

SEQ ID NO: 4256 - RNA, 19 nt, synthetic construct
  source 1..19: mol_type = other RNA
ccgggcggggggctgaccc

SEQ ID NO: 4257 - RNA, 19 nt, synthetic construct
  source 1..19: mol_type = other RNA
gccgggcggggggctgacc

SEQ ID NO: 4258 - RNA, 19 nt, synthetic construct
  source 1..19: mol_type = other RNA
ggccgggcggggggctgac

SEQ ID NO: 4259 - RNA, 19 nt, synthetic construct
  source 1..19: mol_type = other RNA
tggccgggcggggggctga

SEQ ID NO: 4260 - RNA, 19 nt, synthetic construct
  source 1..19: mol_type = other RNA
ctggccgggcggggggctg

SEQ ID NO: 4261 - RNA, 19 nt, synthetic construct
  source 1..19: mol_type = other RNA
gctggccgggcggggggct

SEQ ID NO: 4262 - RNA, 19 nt, synthetic construct
  source 1..19: mol_type = other RNA
ggctggccgggcggggggc

SEQ ID NO: 4263 - RNA, 19 nt, synthetic construct
  source 1..19: mol_type = other RNA
cggctggccgggcgggggg

SEQ ID NO: 4264 - RNA, 19 nt, synthetic construct
  source 1..19: mol_type = other RNA
gcggctggccgggcggggg

SEQ ID NO: 4265 - RNA, 19 nt, synthetic construct
  source 1..19: mol_type = other RNA
ggcggctggccgggcgggg

SEQ ID NO: 4266 - RNA, 19 nt, synthetic construct
  source 1..19: mol_type = other RNA
gggcggctggccgggcggg

SEQ ID NO: 4267 - RNA, 19 nt, synthetic construct
  source 1..19: mol_type = other RNA
ggggcggctggccgggcgg

SEQ ID NO: 4268 - RNA, 19 nt, synthetic construct
  source 1..19: mol_type = other RNA
cggggcggctggccgggcg

SEQ ID NO: 4269 - RNA, 19 nt, synthetic construct
  source 1..19: mol_type = other RNA
acggggcggctggccgggc

SEQ ID NO: 4270 - RNA, 19 nt, synthetic construct
  source 1..19: mol_type = other RNA
gacggggcggctggccggg

SEQ ID NO: 4271 - RNA, 19 nt, synthetic construct
  source 1..19: mol_type = other RNA
ggacggggcggctggccgg

SEQ ID NO: 4272 - RNA, 19 nt, synthetic construct
  source 1..19: mol_type = other RNA
cggacggggcggctggccg

SEQ ID NO: 4273 - RNA, 19 nt, synthetic construct
  source 1..19: mol_type = other RNA
ccggacggggcggctggcc

SEQ ID NO: 4274 - RNA, 19 nt, synthetic construct
  source 1..19: mol_type = other RNA
cccggacggggcggctggc

SEQ ID NO: 4275 - RNA, 19 nt, synthetic construct
  source 1..19: mol_type = other RNA
tcccggacggggcggctgg

SEQ ID NO: 4276 - RNA, 19 nt, synthetic construct
  source 1..19: mol_type = other RNA
ctcccggacggggcggctg

SEQ ID NO: 4277 - RNA, 19 nt, synthetic construct
  source 1..19: mol_type = other RNA
cctcccggacggggcggct

SEQ ID NO: 4278 - RNA, 19 nt, synthetic construct
  source 1..19: mol_type = other RNA
acctcccggacggggcggc

SEQ ID NO: 4279 - RNA, 19 nt, synthetic construct
  source 1..19: mol_type = other RNA
cacctcccggacggggcgg

SEQ ID NO: 4280 - RNA, 19 nt, synthetic construct
  source 1..19: mol_type = other RNA
tcacctcccggacggggcg

SEQ ID NO: 4281 - RNA, 19 nt, synthetic construct
  source 1..19: mol_type = other RNA
ctcacctcccggacggggc

SEQ ID NO: 4282 - RNA, 19 nt, synthetic construct
  source 1..19: mol_type = other RNA
cctcacctcccggacgggg

SEQ ID NO: 4283 - RNA, 19 nt, synthetic construct
  source 1..19: mol_type = other RNA
ccctcacctcccggacggg

SEQ ID NO: 4284 - RNA, 19 nt, synthetic construct
  source 1..19: mol_type = other RNA
cccctcacctcccggacgg

SEQ ID NO: 4285 - RNA, 19 nt, synthetic construct
  source 1..19: mol_type = other RNA
acccctcacctcccggacg

SEQ ID NO: 4286 - RNA, 19 nt, synthetic construct
  source 1..19: mol_type = other RNA
cacccctcacctcccggac

SEQ ID NO: 4287 - RNA, 19 nt, synthetic construct
  source 1..19: mol_type = other RNA
gcacccctcacctcccgga

SEQ ID NO: 4288 - RNA, 19 nt, synthetic construct
  source 1..19: mol_type = other RNA
ggcacccctcacctcccgg

SEQ ID NO: 4289 - RNA, 19 nt, synthetic construct
  source 1..19: mol_type = other RNA
aggcacccctcacctcccg

SEQ ID NO: 4290 - RNA, 19 nt, synthetic construct
  source 1..19: mol_type = other RNA
gaggcacccctcacctccc

SEQ ID NO: 4291 - RNA, 19 nt, synthetic construct
  source 1..19: mol_type = other RNA
agaggcacccctcacctcc

SEQ ID NO: 4292 - RNA, 19 nt, synthetic construct
  source 1..19: mol_type = other RNA
cagaggcacccctcacctc

SEQ ID NO: 4293 - RNA, 19 nt, synthetic construct
  source 1..19: mol_type = other RNA
gcagaggcacccctcacct

SEQ ID NO: 4294 - RNA, 19 nt, synthetic construct
  source 1..19: mol_type = other RNA
ggcagaggcacccctcacc

SEQ ID NO: 4295 - RNA, 19 nt, synthetic construct
  source 1..19: mol_type = other RNA
gggcagaggcacccctcac

SEQ ID NO: 4296 - RNA, 19 nt, synthetic construct
  source 1..19: mol_type = other RNA
tgggcagaggcacccctca

SEQ ID NO: 4297 - RNA, 19 nt, synthetic construct
  source 1..19: mol_type = other RNA
ctgggcagaggcacccctc

SEQ ID NO: 4298 - RNA, 19 nt, synthetic construct
  source 1..19: mol_type = other RNA
gctgggcagaggcacccct

SEQ ID NO: 4299 - RNA, 19 nt, synthetic construct
  source 1..19: mol_type = other RNA
ggctgggcagaggcacccc

SEQ ID NO: 4300 - RNA, 19 nt, synthetic construct
  source 1..19: mol_type = other RNA
cggctgggcagaggcaccc

SEQ ID NO: 4301 - RNA, 19 nt, synthetic construct
  source 1..19: mol_type = other RNA
gcggctgggcagaggcacc

SEQ ID NO: 4302 - RNA, 19 nt, synthetic construct
  source 1..19: mol_type = other RNA
ggcggctgggcagaggcac

SEQ ID NO: 4303 - RNA, 19 nt, synthetic construct
  source 1..19: mol_type = other RNA
gggcggctgggcagaggca

SEQ ID NO: 4304 - RNA, 19 nt, synthetic construct
  source 1..19: mol_type = other RNA
ggggcggctgggcagaggc

SEQ ID NO: 4305 - RNA, 19 nt, synthetic construct
  source 1..19: mol_type = other RNA
aggggcggctgggcagagg

SEQ ID NO: 4306 - RNA, 19 nt, synthetic construct
  source 1..19: mol_type = other RNA
taggggcggctgggcagag

SEQ ID NO: 4307 - RNA, 19 nt, synthetic construct
  source 1..19: mol_type = other RNA
gtaggggcggctgggcaga

SEQ ID NO: 4308 - RNA, 19 nt, synthetic construct
  source 1..19: mol_type = other RNA
agtaggggcggctgggcag

SEQ ID NO: 4309 - RNA, 19 nt, synthetic construct
  source 1..19: mol_type = other RNA
cagtaggggcggctgggca

SEQ ID NO: 4310 - RNA, 19 nt, synthetic construct
  source 1..19: mol_type = other RNA
ccagtaggggcggctgggc

SEQ ID NO: 4311 - RNA, 19 nt, synthetic construct
  source 1..19: mol_type = other RNA
cccagtaggggcggctggg

SEQ ID NO: 4312 - RNA, 19 nt, synthetic construct
  source 1..19: mol_type = other RNA
tcccagtaggggcggctgg

SEQ ID NO: 4313 - RNA, 19 nt, synthetic construct
  source 1..19: mol_type = other RNA
ttcccagtaggggcggctg

SEQ ID NO: 4314 - RNA, 19 nt, synthetic construct
  source 1..19: mol_type = other RNA
cttcccagtaggggcggct

SEQ ID NO: 4315 - RNA, 19 nt, synthetic construct
  source 1..19: mol_type = other RNA
acttcccagtaggggcggc

SEQ ID NO: 4316 - RNA, 19 nt, synthetic construct
  source 1..19: mol_type = other RNA
cacttcccagtaggggcgg

SEQ ID NO: 4317 - RNA, 19 nt, synthetic construct
  source 1..19: mol_type = other RNA
tcacttcccagtaggggcg

SEQ ID NO: 4318 - RNA, 19 nt, synthetic construct
  source 1..19: mol_type = other RNA
ctcacttcccagtaggggc

SEQ ID NO: 4319 - RNA, 19 nt, synthetic construct
  source 1..19: mol_type = other RNA
cctcacttcccagtagggg

SEQ ID NO: 4320 - RNA, 19 nt, synthetic construct
  source 1..19: mol_type = other RNA
tcctcacttcccagtaggg

SEQ ID NO: 4321 - RNA, 19 nt, synthetic construct
  source 1..19: mol_type = other RNA
ctcctcacttcccagtagg

SEQ ID NO: 4322 - RNA, 19 nt, synthetic construct
  source 1..19: mol_type = other RNA
gctcctcacttcccagtag

SEQ ID NO: 4323 - RNA, 19 nt, synthetic construct
  source 1..19: mol_type = other RNA
ggctcctcacttcccagta

SEQ ID NO: 4324 - RNA, 19 nt, synthetic construct
  source 1..19: mol_type = other RNA
gggctcctcacttcccagt

SEQ ID NO: 4325 - RNA, 19 nt, synthetic construct
  source 1..19: mol_type = other RNA
ggggctcctcacttcccag

SEQ ID NO: 4326 - RNA, 19 nt, synthetic construct
  source 1..19: mol_type = other RNA
aggggctcctcacttccca

SEQ ID NO: 4327 - RNA, 19 nt, synthetic construct
  source 1..19: mol_type = other RNA
gaggggctcctcacttccc

SEQ ID NO: 4328 - RNA, 19 nt, synthetic construct
  source 1..19: mol_type = other RNA
agaggggctcctcacttcc

SEQ ID NO: 4329 - RNA, 19 nt, synthetic construct
  source 1..19: mol_type = other RNA
cagaggggctcctcacttc

SEQ ID NO: 4330 - RNA, 19 nt, synthetic construct
  source 1..19: mol_type = other RNA
gcagaggggctcctcactt

SEQ ID NO: 4331 - RNA, 19 nt, synthetic construct
  source 1..19: mol_type = other RNA
ggcagaggggctcctcact

SEQ ID NO: 4332 - RNA, 19 nt, synthetic construct
  source 1..19: mol_type = other RNA
gggcagaggggctcctcac

SEQ ID NO: 4333 - RNA, 19 nt, synthetic construct
  source 1..19: mol_type = other RNA
cgggcagaggggctcctca

SEQ ID NO: 4334 - RNA, 19 nt, synthetic construct
  source 1..19: mol_type = other RNA
ccgggcagaggggctcctc

SEQ ID NO: 4335 - RNA, 19 nt, synthetic construct
  source 1..19: mol_type = other RNA
gccgggcagaggggctcct

SEQ ID NO: 4336 - RNA, 19 nt, synthetic construct
  source 1..19: mol_type = other RNA
ggccgggcagaggggctcc

SEQ ID NO: 4337 - RNA, 19 nt, synthetic construct
  source 1..19: mol_type = other RNA
tggccgggcagaggggctc

SEQ ID NO: 4338 - RNA, 19 nt, synthetic construct
  source 1..19: mol_type = other RNA
gtggccgggcagaggggct

SEQ ID NO: 4339 - RNA, 19 nt, synthetic construct
  source 1..19: mol_type = other RNA
ggtggccgggcagaggggc

SEQ ID NO: 4340 - RNA, 19 nt, synthetic construct
  source 1..19: mol_type = other RNA
tggtggccgggcagagggg

SEQ ID NO: 4341 - RNA, 19 nt, synthetic construct
  source 1..19: mol_type = other RNA
gtggtggccgggcagaggg

SEQ ID NO: 4342 - RNA, 19 nt, synthetic construct
  source 1..19: mol_type = other RNA
ggtggtggccgggcagagg

SEQ ID NO: 4343 - RNA, 19 nt, synthetic construct
  source 1..19: mol_type = other RNA
gggtggtggccgggcagag

SEQ ID NO: 4344 - RNA, 19 nt, synthetic construct
  source 1..19: mol_type = other RNA
ggggtggtggccgggcaga

SEQ ID NO: 4345 - RNA, 19 nt, synthetic construct
  source 1..19: mol_type = other RNA
tggggtggtggccgggcag

SEQ ID NO: 4346 - RNA, 19 nt, synthetic construct
  source 1..19: mol_type = other RNA
atggggtggtggccgggca

SEQ ID NO: 4347 - RNA, 19 nt, synthetic construct
  source 1..19: mol_type = other RNA
gatggggtggtggccgggc

SEQ ID NO: 4348 - RNA, 19 nt, synthetic construct
  source 1..19: mol_type = other RNA
agatggggtggtggccggg

SEQ ID NO: 4349 - RNA, 19 nt, synthetic construct
  source 1..19: mol_type = other RNA
cagatggggtggtggccgg

SEQ ID NO: 4350 - RNA, 19 nt, synthetic construct
  source 1..19: mol_type = other RNA
ccagatggggtggtggccg

SEQ ID NO: 4351 - RNA, 19 nt, synthetic construct
  source 1..19: mol_type = other RNA
cccagatggggtggtggcc

SEQ ID NO: 4352 - RNA, 19 nt, synthetic construct
  source 1..19: mol_type = other RNA
tcccagatggggtggtggc

SEQ ID NO: 4353 - RNA, 19 nt, synthetic construct
  source 1..19: mol_type = other RNA
ttcccagatggggtggtgg

SEQ ID NO: 4354 - RNA, 19 nt, synthetic construct
  source 1..19: mol_type = other RNA
cttcccagatggggtggtg

SEQ ID NO: 4355 - RNA, 19 nt, synthetic construct
  source 1..19: mol_type = other RNA
acttcccagatggggtggt

SEQ ID NO: 4356 - RNA, 19 nt, synthetic construct
  source 1..19: mol_type = other RNA
cacttcccagatggggtgg

SEQ ID NO: 4357 - RNA, 19 nt, synthetic construct
  source 1..19: mol_type = other RNA
acacttcccagatggggtg

SEQ ID NO: 4358 - RNA, 19 nt, synthetic construct
  source 1..19: mol_type = other RNA
tacacttcccagatggggt

SEQ ID NO: 4359 - RNA, 19 nt, synthetic construct
  source 1..19: mol_type = other RNA
gtacacttcccagatgggg

SEQ ID NO: 4360 - RNA, 19 nt, synthetic construct
  source 1..19: mol_type = other RNA
ggtacacttcccagatggg

SEQ ID NO: 4361 - RNA, 19 nt, synthetic construct
  source 1..19: mol_type = other RNA
gggtacacttcccagatgg

SEQ ID NO: 4362 - RNA, 19 nt, synthetic construct
  source 1..19: mol_type = other RNA
tgggtacacttcccagatg

SEQ ID NO: 4363 - RNA, 19 nt, synthetic construct
  source 1..19: mol_type = other RNA
ttgggtacacttcccagat

SEQ ID NO: 4364 - RNA, 19 nt, synthetic construct
  source 1..19: mol_type = other RNA
attgggtacacttcccaga

SEQ ID NO: 4365 - RNA, 19 nt, synthetic construct
  source 1..19: mol_type = other RNA
tattgggtacacttcccag

SEQ ID NO: 4366 - RNA, 19 nt, synthetic construct
  source 1..19: mol_type = other RNA
ctattgggtacacttccca

SEQ ID NO: 4367 - RNA, 19 nt, synthetic construct
  source 1..19: mol_type = other RNA
gctattgggtacacttccc

SEQ ID NO: 4368 - RNA, 19 nt, synthetic construct
  source 1..19: mol_type = other RNA
agctattgggtacacttcc

SEQ ID NO: 4369 - RNA, 19 nt, synthetic construct
  source 1..19: mol_type = other RNA
gagctattgggtacacttc

SEQ ID NO: 4370 - RNA, 19 nt, synthetic construct
  source 1..19: mol_type = other RNA
tgagctattgggtacactt

SEQ ID NO: 4371 - RNA, 19 nt, synthetic construct
  source 1..19: mol_type = other RNA
atgagctattgggtacact

SEQ ID NO: 4372 - RNA, 19 nt, synthetic construct
  source 1..19: mol_type = other RNA
aatgagctattgggtacac

SEQ ID NO: 4373 - RNA, 19 nt, synthetic construct
  source 1..19: mol_type = other RNA
caatgagctattgggtaca

SEQ ID NO: 4374 - RNA, 19 nt, synthetic construct
  source 1..19: mol_type = other RNA
tcaatgagctattgggtac

SEQ ID NO: 4375 - RNA, 19 nt, synthetic construct
  source 1..19: mol_type = other RNA
ctcaatgagctattgggta

SEQ ID NO: 4376 - RNA, 19 nt, synthetic construct
  source 1..19: mol_type = other RNA
tctcaatgagctattgggt

SEQ ID NO: 4377 - RNA, 19 nt, synthetic construct
  source 1..19: mol_type = other RNA
ttctcaatgagctattggg

SEQ ID NO: 4378 - RNA, 19 nt, synthetic construct
  source 1..19: mol_type = other RNA
gttctcaatgagctattgg

SEQ ID NO: 4379 - RNA, 19 nt, synthetic construct
  source 1..19: mol_type = other RNA
cgttctcaatgagctattg

SEQ ID NO: 4380 - RNA, 19 nt, synthetic construct
  source 1..19: mol_type = other RNA
ccgttctcaatgagctatt

SEQ ID NO: 4381 - RNA, 19 nt, synthetic construct
  source 1..19: mol_type = other RNA
cccgttctcaatgagctat

SEQ ID NO: 4382 - RNA, 19 nt, synthetic construct
  source 1..19: mol_type = other RNA
gcccgttctcaatgagcta

SEQ ID NO: 4383 - RNA, 19 nt, synthetic construct
  source 1..19: mol_type = other RNA
ggcccgttctcaatgagct

SEQ ID NO: 4384 - RNA, 19 nt, synthetic construct
  source 1..19: mol_type = other RNA
tggcccgttctcaatgagc

SEQ ID NO: 4385 - RNA, 19 nt, synthetic construct
  source 1..19: mol_type = other RNA
atggcccgttctcaatgag

SEQ ID NO: 4386 - RNA, 19 nt, synthetic construct
  source 1..19: mol_type = other RNA
catggcccgttctcaatga

SEQ ID NO: 4387 - RNA, 19 nt, synthetic construct
  source 1..19: mol_type = other RNA
tcatggcccgttctcaatg

SEQ ID NO: 4388 - RNA, 19 nt, synthetic construct
  source 1..19: mol_type = other RNA
ctcatggcccgttctcaat

SEQ ID NO: 4389 - RNA, 19 nt, synthetic construct
  source 1..19: mol_type = other RNA
cctcatggcccgttctcaa

SEQ ID NO: 4390 - RNA, 19 nt, synthetic construct
  source 1..19: mol_type = other RNA
tcctcatggcccgttctca

SEQ ID NO: 4391 - RNA, 19 nt, synthetic construct
  source 1..19: mol_type = other RNA
gtcctcatggcccgttctc

SEQ ID NO: 4392 - RNA, 19 nt, synthetic construct
  source 1..19: mol_type = other RNA
tgtcctcatggcccgttct

SEQ ID NO: 4393 - RNA, 19 nt, synthetic construct
  source 1..19: mol_type = other RNA
ttgtcctcatggcccgttc

SEQ ID NO: 4394 - RNA, 19 nt, synthetic construct
  source 1..19: mol_type = other RNA
attgtcctcatggcccgtt

SEQ ID NO: 4395 - RNA, 19 nt, synthetic construct
  source 1..19: mol_type = other RNA
cattgtcctcatggcccgt

SEQ ID NO: 4396 - RNA, 19 nt, synthetic construct
  source 1..19: mol_type = other RNA
ccattgtcctcatggcccg

SEQ ID NO: 4397 - RNA, 19 nt, synthetic construct
  source 1..19: mol_type = other RNA
gccattgtcctcatggccc

SEQ ID NO: 4398 - RNA, 19 nt, synthetic construct
  source 1..19: mol_type = other RNA
cgccattgtcctcatggcc

SEQ ID NO: 4399 - RNA, 19 nt, synthetic construct
  source 1..19: mol_type = other RNA
ccgccattgtcctcatggc

SEQ ID NO: 4400 - RNA, 19 nt, synthetic construct
  source 1..19: mol_type = other RNA
accgccattgtcctcatgg

SEQ ID NO: 4401 - RNA, 19 nt, synthetic construct
  source 1..19: mol_type = other RNA
aaccgccattgtcctcatg

SEQ ID NO: 4402 - RNA, 19 nt, synthetic construct
  source 1..19: mol_type = other RNA
aaaccgccattgtcctcat

SEQ ID NO: 4403 - RNA, 19 nt, synthetic construct
  source 1..19: mol_type = other RNA
aaaaccgccattgtcctca

SEQ ID NO: 4404 - RNA, 19 nt, synthetic construct
  source 1..19: mol_type = other RNA
caaaaccgccattgtcctc

SEQ ID NO: 4405 - RNA, 19 nt, synthetic construct
  source 1..19: mol_type = other RNA
acaaaaccgccattgtcct

SEQ ID NO: 4406 - RNA, 19 nt, synthetic construct
  source 1..19: mol_type = other RNA
cacaaaaccgccattgtcc

SEQ ID NO: 4407 - RNA, 19 nt, synthetic construct
  source 1..19: mol_type = other RNA
ccacaaaaccgccattgtc

SEQ ID NO: 4408 - RNA, 19 nt, synthetic construct
  source 1..19: mol_type = other RNA
tccacaaaaccgccattgt

SEQ ID NO: 4409 - RNA, 19 nt, synthetic construct
  source 1..19: mol_type = other RNA
ttccacaaaaccgccattg

SEQ ID NO: 4410 - RNA, 19 nt, synthetic construct
  source 1..19: mol_type = other RNA
attccacaaaaccgccatt

SEQ ID NO: 4411 - RNA, 19 nt, synthetic construct
  source 1..19: mol_type = other RNA
tattccacaaaaccgccat

SEQ ID NO: 4412 - RNA, 19 nt, synthetic construct
  source 1..19: mol_type = other RNA
ctattccacaaaaccgcca

SEQ ID NO: 4413 - RNA, 19 nt, synthetic construct
  source 1..19: mol_type = other RNA
tctattccacaaaaccgcc

SEQ ID NO: 4414 - RNA, 19 nt, synthetic construct
  source 1..19: mol_type = other RNA
ttctattccacaaaaccgc

SEQ ID NO: 4415 - RNA, 19 nt, synthetic construct
  source 1..19: mol_type = other RNA
tttctattccacaaaaccg

SEQ ID NO: 4416 - RNA, 19 nt, synthetic construct
  source 1..19: mol_type = other RNA
ctttctattccacaaaacc

SEQ ID NO: 4417 - RNA, 19 nt, synthetic construct
  source 1..19: mol_type = other RNA
cctttctattccacaaaac

SEQ ID NO: 4418 - RNA, 19 nt, synthetic construct
  source 1..19: mol_type = other RNA
ccctttctattccacaaaa

SEQ ID NO: 4419 - RNA, 19 nt, synthetic construct
  source 1..19: mol_type = other RNA
cccctttctattccacaaa

SEQ ID NO: 4420 - RNA, 19 nt, synthetic construct
  source 1..19: mol_type = other RNA
ccccctttctattccacaa

SEQ ID NO: 4421 - RNA, 19 nt, synthetic construct
  source 1..19: mol_type = other RNA
cccccctttctattccaca

SEQ ID NO: 4422 - RNA, 19 nt, synthetic construct
  source 1..19: mol_type = other RNA
tcccccctttctattccac

SEQ ID NO: 4423 - RNA, 19 nt, synthetic construct
  source 1..19: mol_type = other RNA
ttcccccctttctattcca

SEQ ID NO: 4424 - RNA, 19 nt, synthetic construct
  source 1..19: mol_type = other RNA
tttcccccctttctattcc

SEQ ID NO: 4425 - RNA, 19 nt, synthetic construct
  source 1..19: mol_type = other RNA
ctttcccccctttctattc

SEQ ID NO: 4426 - RNA, 19 nt, synthetic construct
  source 1..19: mol_type = other RNA
cctttcccccctttctatt

SEQ ID NO: 4427 - RNA, 19 nt, synthetic construct
  source 1..19: mol_type = other RNA
acctttcccccctttctat

SEQ ID NO: 4428 - RNA, 19 nt, synthetic construct
  source 1..19: mol_type = other RNA
cacctttcccccctttcta

SEQ ID NO: 4429 - RNA, 19 nt, synthetic construct
  source 1..19: mol_type = other RNA
ccacctttcccccctttct

SEQ ID NO: 4430 - RNA, 19 nt, synthetic construct
  source 1..19: mol_type = other RNA
cccacctttcccccctttc

SEQ ID NO: 4431 - RNA, 19 nt, synthetic construct
  source 1..19: mol_type = other RNA
ccccacctttccccccttt

SEQ ID NO: 4432 - RNA, 19 nt, synthetic construct
  source 1..19: mol_type = other RNA
tccccacctttcccccctt

SEQ ID NO: 4433 - RNA, 19 nt, synthetic construct
  source 1..19: mol_type = other RNA
ttccccacctttcccccct

SEQ ID NO: 4434 - RNA, 19 nt, synthetic construct
  source 1..19: mol_type = other RNA
tttccccacctttcccccc

SEQ ID NO: 4435 - RNA, 19 nt, synthetic construct
  source 1..19: mol_type = other RNA
ttttccccacctttccccc

SEQ ID NO: 4436 - RNA, 19 nt, synthetic construct
  source 1..19: mol_type = other RNA
cttttccccacctttcccc

SEQ ID NO: 4437 - RNA, 19 nt, synthetic construct
  source 1..19: mol_type = other RNA
tcttttccccacctttccc

SEQ ID NO: 4438 - RNA, 19 nt, synthetic construct
  source 1..19: mol_type = other RNA
atcttttccccacctttcc

SEQ ID NO: 4439 - RNA, 19 nt, synthetic construct
  source 1..19: mol_type = other RNA
aatcttttccccacctttc

SEQ ID NO: 4440 - RNA, 19 nt, synthetic construct
  source 1..19: mol_type = other RNA
caatcttttccccaccttt

SEQ ID NO: 4441 - RNA, 19 nt, synthetic construct
  source 1..19: mol_type = other RNA
tcaatcttttccccacctt

SEQ ID NO: 4442 - RNA, 19 nt, synthetic construct
  source 1..19: mol_type = other RNA
ctcaatcttttccccacct

SEQ ID NO: 4443 - RNA, 19 nt, synthetic construct
  source 1..19: mol_type = other RNA
tctcaatcttttccccacc

SEQ ID NO: 4444 - RNA, 19 nt, synthetic construct
  source 1..19: mol_type = other RNA
ttctcaatcttttccccac

SEQ ID NO: 4445 - RNA, 19 nt, synthetic construct
  source 1..19: mol_type = other RNA
tttctcaatcttttcccca

SEQ ID NO: 4446 - RNA, 19 nt, synthetic construct
  source 1..19: mol_type = other RNA
atttctcaatcttttcccc

SEQ ID NO: 4447 - RNA, 19 nt, synthetic construct
  source 1..19: mol_type = other RNA
gatttctcaatcttttccc

SEQ ID NO: 4448 - RNA, 19 nt, synthetic construct
  source 1..19: mol_type = other RNA
cgatttctcaatcttttcc

SEQ ID NO: 4449 - RNA, 19 nt, synthetic construct
  source 1..19: mol_type = other RNA
ccgatttctcaatcttttc

SEQ ID NO: 4450 - RNA, 19 nt, synthetic construct
  source 1..19: mol_type = other RNA
tccgatttctcaatctttt

SEQ ID NO: 4451 - RNA, 19 nt, synthetic construct
  source 1..19: mol_type = other RNA
atccgatttctcaatcttt

SEQ ID NO: 4452 - RNA, 19 nt, synthetic construct
  source 1..19: mol_type = other RNA
catccgatttctcaatctt

SEQ ID NO: 4453 - RNA, 19 nt, synthetic construct
  source 1..19: mol_type = other RNA
ccatccgatttctcaatct

SEQ ID NO: 4454 - RNA, 19 nt, synthetic construct
  source 1..19: mol_type = other RNA
accatccgatttctcaatc

SEQ ID NO: 4455 - RNA, 19 nt, synthetic construct
  source 1..19: mol_type = other RNA
aaccatccgatttctcaat

SEQ ID NO: 4456 - RNA, 19 nt, synthetic construct
  source 1..19: mol_type = other RNA
caaccatccgatttctcaa

SEQ ID NO: 4457 - RNA, 19 nt, synthetic construct
  source 1..19: mol_type = other RNA
gcaaccatccgatttctca

SEQ ID NO: 4458 - RNA, 19 nt, synthetic construct
  source 1..19: mol_type = other RNA
ggcaaccatccgatttctc

SEQ ID NO: 4459 - RNA, 19 nt, synthetic construct
  source 1..19: mol_type = other RNA
aggcaaccatccgatttct

SEQ ID NO: 4460 - RNA, 19 nt, synthetic construct
  source 1..19: mol_type = other RNA
aaggcaaccatccgatttc

SEQ ID NO: 4461 - RNA, 19 nt, synthetic construct
  source 1..19: mol_type = other RNA
caaggcaaccatccgattt

SEQ ID NO: 4462 - RNA, 19 nt, synthetic construct
  source 1..19: mol_type = other RNA
acaaggcaaccatccgatt

SEQ ID NO: 4463 - RNA, 19 nt, synthetic construct
  source 1..19: mol_type = other RNA
gacaaggcaaccatccgat

SEQ ID NO: 4464 - RNA, 19 nt, synthetic construct
  source 1..19: mol_type = other RNA
agacaaggcaaccatccga

SEQ ID NO: 4465 - RNA, 19 nt, synthetic construct
  source 1..19: mol_type = other RNA
cagacaaggcaaccatccg

SEQ ID NO: 4466 - RNA, 19 nt, synthetic construct
  source 1..19: mol_type = other RNA
acagacaaggcaaccatcc

SEQ ID NO: 4467 - RNA, 19 nt, synthetic construct
  source 1..19: mol_type = other RNA
cacagacaaggcaaccatc

SEQ ID NO: 4468 - RNA, 19 nt, synthetic construct
  source 1..19: mol_type = other RNA
acacagacaaggcaaccat

SEQ ID NO: 4469 - RNA, 19 nt, synthetic construct
  source 1..19: mol_type = other RNA
cacacagacaaggcaacca

SEQ ID NO: 4470 - RNA, 19 nt, synthetic construct
  source 1..19: mol_type = other RNA
ccacacagacaaggcaacc

SEQ ID NO: 4471 - RNA, 19 nt, synthetic construct
  source 1..19: mol_type = other RNA
tccacacagacaaggcaac

SEQ ID NO: 4472 - RNA, 19 nt, synthetic construct
  source 1..19: mol_type = other RNA
ttccacacagacaaggcaa

SEQ ID NO: 4473 - RNA, 19 nt, synthetic construct
  source 1..19: mol_type = other RNA
tttccacacagacaaggca

SEQ ID NO: 4474 - RNA, 19 nt, synthetic construct
  source 1..19: mol_type = other RNA
ctttccacacagacaaggc

SEQ ID NO: 4475 - RNA, 19 nt, synthetic construct
  source 1..19: mol_type = other RNA
tctttccacacagacaagg

SEQ ID NO: 4476 - RNA, 19 nt, synthetic construct
  source 1..19: mol_type = other RNA
ttctttccacacagacaag

SEQ ID NO: 4477 - RNA, 19 nt, synthetic construct
  source 1..19: mol_type = other RNA
cttctttccacacagacaa

SEQ ID NO: 4478 - RNA, 19 nt, synthetic construct
  source 1..19: mol_type = other RNA
acttctttccacacagaca

SEQ ID NO: 4479 - RNA, 19 nt, synthetic construct
  source 1..19: mol_type = other RNA
tacttctttccacacagac

SEQ ID NO: 4480 - RNA, 19 nt, synthetic construct
  source 1..19: mol_type = other RNA
ctacttctttccacacaga

SEQ ID NO: 4481 - RNA, 19 nt, synthetic construct
  source 1..19: mol_type = other RNA
tctacttctttccacacag

SEQ ID NO: 4482 - RNA, 19 nt, synthetic construct
  source 1..19: mol_type = other RNA
gtctacttctttccacaca

SEQ ID NO: 4483 - RNA, 19 nt, synthetic construct
  source 1..19: mol_type = other RNA
tgtctacttctttccacac

SEQ ID NO: 4484 - RNA, 19 nt, synthetic construct
  source 1..19: mol_type = other RNA
atgtctacttctttccaca

SEQ ID NO: 4485 - RNA, 19 nt, synthetic construct
  source 1..19: mol_type = other RNA
catgtctacttctttccac

SEQ ID NO: 4486 - RNA, 19 nt, synthetic construct
  source 1..19: mol_type = other RNA
ccatgtctacttctttcca

SEQ ID NO: 4487 - RNA, 19 nt, synthetic construct
  source 1..19: mol_type = other RNA
cccatgtctacttctttcc

SEQ ID NO: 4488 - RNA, 19 nt, synthetic construct
  source 1..19: mol_type = other RNA
tcccatgtctacttctttc

SEQ ID NO: 4489 - RNA, 19 nt, synthetic construct
  source 1..19: mol_type = other RNA
ctcccatgtctacttcttt

SEQ ID NO: 4490 - RNA, 19 nt, synthetic construct
  source 1..19: mol_type = other RNA
tctcccatgtctacttctt

SEQ ID NO: 4491 - RNA, 19 nt, synthetic construct
  source 1..19: mol_type = other RNA
gtctcccatgtctacttct

SEQ ID NO: 4492 - RNA, 19 nt, synthetic construct
  source 1..19: mol_type = other RNA
agtctcccatgtctacttc

SEQ ID NO: 4493 - RNA, 19 nt, synthetic construct
  source 1..19: mol_type = other RNA
aagtctcccatgtctactt

SEQ ID NO: 4494 - RNA, 19 nt, synthetic construct
  source 1..19: mol_type = other RNA
aaagtctcccatgtctact

SEQ ID NO: 4495 - RNA, 19 nt, synthetic construct
  source 1..19: mol_type = other RNA
aaaagtctcccatgtctac

SEQ ID NO: 4496 - RNA, 19 nt, synthetic construct
  source 1..19: mol_type = other RNA
gaaaagtctcccatgtcta

SEQ ID NO: 4497 - RNA, 19 nt, synthetic construct
  source 1..19: mol_type = other RNA
tgaaaagtctcccatgtct

SEQ ID NO: 4498 - RNA, 19 nt, synthetic construct
  source 1..19: mol_type = other RNA
atgaaaagtctcccatgtc

SEQ ID NO: 4499 - RNA, 19 nt, synthetic construct
  source 1..19: mol_type = other RNA
aatgaaaagtctcccatgt

SEQ ID NO: 4500 - RNA, 19 nt, synthetic construct
  source 1..19: mol_type = other RNA
aaatgaaaagtctcccatg

SEQ ID NO: 4501 - RNA, 19 nt, synthetic construct
  source 1..19: mol_type = other RNA
aaaatgaaaagtctcccat

SEQ ID NO: 4502 - RNA, 19 nt, synthetic construct
  source 1..19: mol_type = other RNA
caaaatgaaaagtctccca

SEQ ID NO: 4503 - RNA, 19 nt, synthetic construct
  source 1..19: mol_type = other RNA
acaaaatgaaaagtctccc

SEQ ID NO: 4504 - RNA, 19 nt, synthetic construct
  source 1..19: mol_type = other RNA
aacaaaatgaaaagtctcc

SEQ ID NO: 4505 - RNA, 19 nt, synthetic construct
  source 1..19: mol_type = other RNA
gaacaaaatgaaaagtctc

SEQ ID NO: 4506 - RNA, 19 nt, synthetic construct
  source 1..19: mol_type = other RNA
agaacaaaatgaaaagtct

SEQ ID NO: 4507 - RNA, 19 nt, synthetic construct
  source 1..19: mol_type = other RNA
cagaacaaaatgaaaagtc

SEQ ID NO: 4508 - RNA, 19 nt, synthetic construct
  source 1..19: mol_type = other RNA
acagaacaaaatgaaaagt

SEQ ID NO: 4509 - RNA, 19 nt, synthetic construct
  source 1..19: mol_type = other RNA
tacagaacaaaatgaaaag

SEQ ID NO: 4510 - RNA, 19 nt, synthetic construct
  source 1..19: mol_type = other RNA
gtacagaacaaaatgaaaa

SEQ ID NO: 4511 - RNA, 19 nt, synthetic construct
  source 1..19: mol_type = other RNA
agtacagaacaaaatgaaa

SEQ ID NO: 4512 - RNA, 19 nt, synthetic construct
  source 1..19: mol_type = other RNA
tagtacagaacaaaatgaa

SEQ ID NO: 4513 - RNA, 19 nt, synthetic construct
  source 1..19: mol_type = other RNA
ttagtacagaacaaaatga

SEQ ID NO: 4514 - RNA, 19 nt, synthetic construct
  source 1..19: mol_type = other RNA
cttagtacagaacaaaatg

SEQ ID NO: 4515 - RNA, 19 nt, synthetic construct
  source 1..19: mol_type = other RNA
tcttagtacagaacaaaat

SEQ ID NO: 4516 - RNA, 19 nt, synthetic construct
  source 1..19: mol_type = other RNA
ttcttagtacagaacaaaa

SEQ ID NO: 4517 - RNA, 19 nt, synthetic construct
  source 1..19: mol_type = other RNA
tttcttagtacagaacaaa

SEQ ID NO: 4518 - RNA, 19 nt, synthetic construct
  source 1..19: mol_type = other RNA
ttttcttagtacagaacaa

SEQ ID NO: 4519 - RNA, 19 nt, synthetic construct
  source 1..19: mol_type = other RNA
tttttcttagtacagaaca

SEQ ID NO: 4520 - RNA, 19 nt, synthetic construct
  source 1..19: mol_type = other RNA
atttttcttagtacagaac

SEQ ID NO: 4521 - RNA, 19 nt, synthetic construct
  source 1..19: mol_type = other RNA
aatttttcttagtacagaa

SEQ ID NO: 4522 - RNA, 19 nt, synthetic construct
  source 1..19: mol_type = other RNA
gaatttttcttagtacaga

SEQ ID NO: 4523 - RNA, 19 nt, synthetic construct
  source 1..19: mol_type = other RNA
agaatttttcttagtacag

SEQ ID NO: 4524 - RNA, 19 nt, synthetic construct
  source 1..19: mol_type = other RNA
aagaatttttcttagtaca

SEQ ID NO: 4525 - RNA, 19 nt, synthetic construct
  source 1..19: mol_type = other RNA
gaagaatttttcttagtac

SEQ ID NO: 4526 - RNA, 19 nt, synthetic construct
  source 1..19: mol_type = other RNA
agaagaatttttcttagta

SEQ ID NO: 4527 - RNA, 19 nt, synthetic construct
  source 1..19: mol_type = other RNA
cagaagaatttttcttagt

SEQ ID NO: 4528 - RNA, 19 nt, synthetic construct
  source 1..19: mol_type = other RNA
gcagaagaatttttcttag

SEQ ID NO: 4529 - RNA, 19 nt, synthetic construct
  source 1..19: mol_type = other RNA
ggcagaagaatttttctta

SEQ ID NO: 4530 - RNA, 19 nt, synthetic construct
  source 1..19: mol_type = other RNA
aggcagaagaatttttctt

SEQ ID NO: 4531 - RNA, 19 nt, synthetic construct
  source 1..19: mol_type = other RNA
aaggcagaagaatttttct

SEQ ID NO: 4532 - RNA, 19 nt, synthetic construct
  source 1..19: mol_type = other RNA
caaggcagaagaatttttc

SEQ ID NO: 4533 - RNA, 19 nt, synthetic construct
  source 1..19: mol_type = other RNA
ccaaggcagaagaattttt

SEQ ID NO: 4534 - RNA, 19 nt, synthetic construct
  source 1..19: mol_type = other RNA
cccaaggcagaagaatttt

SEQ ID NO: 4535 - RNA, 19 nt, synthetic construct
  source 1..19: mol_type = other RNA
tcccaaggcagaagaattt

SEQ ID NO: 4536 - RNA, 19 nt, synthetic construct
  source 1..19: mol_type = other RNA
atcccaaggcagaagaatt

SEQ ID NO: 4537 - RNA, 19 nt, synthetic construct
  source 1..19: mol_type = other RNA
gatcccaaggcagaagaat

SEQ ID NO: 4538 - RNA, 19 nt, synthetic construct
  source 1..19: mol_type = other RNA
ggatcccaaggcagaagaa

SEQ ID NO: 4539 - RNA, 19 nt, synthetic construct
  source 1..19: mol_type = other RNA
aggatcccaaggcagaaga

SEQ ID NO: 4540 - RNA, 19 nt, synthetic construct
  source 1..19: mol_type = other RNA
caggatcccaaggcagaag

SEQ ID NO: 4541 - RNA, 19 nt, synthetic construct
  source 1..19: mol_type = other RNA
acaggatcccaaggcagaa

SEQ ID NO: 4542 - RNA, 19 nt, synthetic construct
  source 1..19: mol_type = other RNA
aacaggatcccaaggcaga

SEQ ID NO: 4543 - RNA, 19 nt, synthetic construct
  source 1..19: mol_type = other RNA
caacaggatcccaaggcag

SEQ ID NO: 4544 - RNA, 19 nt, synthetic construct
  source 1..19: mol_type = other RNA
tcaacaggatcccaaggca

SEQ ID NO: 4545 - RNA, 19 nt, synthetic construct
  source 1..19: mol_type = other RNA
atcaacaggatcccaaggc

SEQ ID NO: 4546 - RNA, 19 nt, synthetic construct
  source 1..19: mol_type = other RNA
gatcaacaggatcccaagg

SEQ ID NO: 4547 - RNA, 19 nt, synthetic construct
  source 1..19: mol_type = other RNA
agatcaacaggatcccaag

SEQ ID NO: 4548 - RNA, 19 nt, synthetic construct
  source 1..19: mol_type = other RNA
cagatcaacaggatcccaa

SEQ ID NO: 4549 - RNA, 19 nt, synthetic construct
  source 1..19: mol_type = other RNA
acagatcaacaggatccca

SEQ ID NO: 4550 - RNA, 19 nt, synthetic construct
  source 1..19: mol_type = other RNA
cacagatcaacaggatccc

SEQ ID NO: 4551 - RNA, 19 nt, synthetic construct
  source 1..19: mol_type = other RNA
tcacagatcaacaggatcc

SEQ ID NO: 4552 - RNA, 19 nt, synthetic construct
  source 1..19: mol_type = other RNA
gtcacagatcaacaggatc

SEQ ID NO: 4553 - RNA, 19 nt, synthetic construct
  source 1..19: mol_type = other RNA
ggtcacagatcaacaggat

SEQ ID NO: 4554 - RNA, 19 nt, synthetic construct
  source 1..19: mol_type = other RNA
aggtcacagatcaacagga

SEQ ID NO: 4555 - RNA, 19 nt, synthetic construct
  source 1..19: mol_type = other RNA
aaggtcacagatcaacagg

SEQ ID NO: 4556 - RNA, 19 nt, synthetic construct
  source 1..19: mol_type = other RNA
taaggtcacagatcaacag

SEQ ID NO: 4557 - RNA, 19 nt, synthetic construct
  source 1..19: mol_type = other RNA
gtaaggtcacagatcaaca

SEQ ID NO: 4558 - RNA, 19 nt, synthetic construct
  source 1..19: mol_type = other RNA
ggtaaggtcacagatcaac

SEQ ID NO: 4559 - RNA, 19 nt, synthetic construct
  source 1..19: mol_type = other RNA
gggtaaggtcacagatcaa

SEQ ID NO: 4560 - RNA, 19 nt, synthetic construct
  source 1..19: mol_type = other RNA
ggggtaaggtcacagatca

SEQ ID NO: 4561 - RNA, 19 nt, synthetic construct
  source 1..19: mol_type = other RNA
gggggtaaggtcacagatc

SEQ ID NO: 4562 - RNA, 19 nt, synthetic construct
  source 1..19: mol_type = other RNA
tgggggtaaggtcacagat

SEQ ID NO: 4563 - RNA, 19 nt, synthetic construct
  source 1..19: mol_type = other RNA
ttgggggtaaggtcacaga

SEQ ID NO: 4564 - RNA, 19 nt, synthetic construct
  source 1..19: mol_type = other RNA
gttgggggtaaggtcacag

SEQ ID NO: 4565 - RNA, 19 nt, synthetic construct
  source 1..19: mol_type = other RNA
ggttgggggtaaggtcaca

SEQ ID NO: 4566 - RNA, 19 nt, synthetic construct
  source 1..19: mol_type = other RNA
gggttgggggtaaggtcac

SEQ ID NO: 4567 - RNA, 19 nt, synthetic construct
  source 1..19: mol_type = other RNA
agggttgggggtaaggtca

SEQ ID NO: 4568 - RNA, 19 nt, synthetic construct
  source 1..19: mol_type = other RNA
cagggttgggggtaaggtc

SEQ ID NO: 4569 - RNA, 19 nt, synthetic construct
  source 1..19: mol_type = other RNA
acagggttgggggtaaggt

SEQ ID NO: 4570 - RNA, 19 nt, synthetic construct
  source 1..19: mol_type = other RNA
cacagggttgggggtaagg

SEQ ID NO: 4571 - RNA, 19 nt, synthetic construct
  source 1..19: mol_type = other RNA
gcacagggttgggggtaag

SEQ ID NO: 4572 - RNA, 19 nt, synthetic construct
  source 1..19: mol_type = other RNA
agcacagggttgggggtaa

SEQ ID NO: 4573 - RNA, 19 nt, synthetic construct
  source 1..19: mol_type = other RNA
gagcacagggttgggggta

SEQ ID NO: 4574 - RNA, 19 nt, synthetic construct
  source 1..19: mol_type = other RNA
agagcacagggttgggggt

SEQ ID NO: 4575 - RNA, 19 nt, synthetic construct
  source 1..19: mol_type = other RNA
gagagcacagggttggggg

SEQ ID NO: 4576 - RNA, 19 nt, synthetic construct
  source 1..19: mol_type = other RNA
agagagcacagggttgggg

SEQ ID NO: 4577 - RNA, 19 nt, synthetic construct
  source 1..19: mol_type = other RNA
cagagagcacagggttggg

SEQ ID NO: 4578 - RNA, 19 nt, synthetic construct
  source 1..19: mol_type = other RNA
tcagagagcacagggttgg

SEQ ID NO: 4579 - RNA, 19 nt, synthetic construct
  source 1..19: mol_type = other RNA
ttcagagagcacagggttg

SEQ ID NO: 4580 - RNA, 19 nt, synthetic construct
  source 1..19: mol_type = other RNA
tttcagagagcacagggtt

SEQ ID NO: 4581 - RNA, 19 nt, synthetic construct
  source 1..19: mol_type = other RNA
gtttcagagagcacagggt

SEQ ID NO: 4582 - RNA, 19 nt, synthetic construct
  source 1..19: mol_type = other RNA
tgtttcagagagcacaggg

SEQ ID NO: 4583 - RNA, 19 nt, synthetic construct
  source 1..19: mol_type = other RNA
atgtttcagagagcacagg

SEQ ID NO: 4584 - RNA, 19 nt, synthetic construct
  source 1..19: mol_type = other RNA
catgtttcagagagcacag

SEQ ID NO: 4585 - RNA, 19 nt, synthetic construct
  source 1..19: mol_type = other RNA
acatgtttcagagagcaca

SEQ ID NO: 4586 - RNA, 19 nt, synthetic construct
  source 1..19: mol_type = other RNA
cacatgtttcagagagcac

SEQ ID NO: 4587 - RNA, 19 nt, synthetic construct
  source 1..19: mol_type = other RNA
gcacatgtttcagagagca

SEQ ID NO: 4588 - RNA, 19 nt, synthetic construct
  source 1..19: mol_type = other RNA
agcacatgtttcagagagc

SEQ ID NO: 4589 - RNA, 19 nt, synthetic construct
  source 1..19: mol_type = other RNA
cagcacatgtttcagagag

SEQ ID NO: 4590 - RNA, 19 nt, synthetic construct
  source 1..19: mol_type = other RNA
acagcacatgtttcagaga

SEQ ID NO: 4591 - RNA, 19 nt, synthetic construct
  source 1..19: mol_type = other RNA
cacagcacatgtttcagag

SEQ ID NO: 4592 - RNA, 19 nt, synthetic construct
  source 1..19: mol_type = other RNA
acacagcacatgtttcaga

SEQ ID NO: 4593 - RNA, 19 nt, synthetic construct
  source 1..19: mol_type = other RNA
gacacagcacatgtttcag

SEQ ID NO: 4594 - RNA, 19 nt, synthetic construct
  source 1..19: mol_type = other RNA
ggacacagcacatgtttca

SEQ ID NO: 4595 - RNA, 19 nt, synthetic construct
  source 1..19: mol_type = other RNA
tggacacagcacatgtttc

SEQ ID NO: 4596 - RNA, 19 nt, synthetic construct
  source 1..19: mol_type = other RNA
gtggacacagcacatgttt

SEQ ID NO: 4597 - RNA, 19 nt, synthetic construct
  source 1..19: mol_type = other RNA
agtggacacagcacatgtt

SEQ ID NO: 4598 - RNA, 19 nt, synthetic construct
  source 1..19: mol_type = other RNA
gagtggacacagcacatgt

SEQ ID NO: 4599 - RNA, 19 nt, synthetic construct
  source 1..19: mol_type = other RNA
tgagtggacacagcacatg

SEQ ID NO: 4600 - RNA, 19 nt, synthetic construct
  source 1..19: mol_type = other RNA
ctgagtggacacagcacat

SEQ ID NO: 4601 - RNA, 19 nt, synthetic construct
  source 1..19: mol_type = other RNA
cctgagtggacacagcaca

SEQ ID NO: 4602 - RNA, 19 nt, synthetic construct
  source 1..19: mol_type = other RNA
ccctgagtggacacagcac

SEQ ID NO: 4603 - RNA, 19 nt, synthetic construct
  source 1..19: mol_type = other RNA
accctgagtggacacagca

SEQ ID NO: 4604 - RNA, 19 nt, synthetic construct
  source 1..19: mol_type = other RNA
aaccctgagtggacacagc

SEQ ID NO: 4605 - RNA, 19 nt, synthetic construct
  source 1..19: mol_type = other RNA
taaccctgagtggacacag

SEQ ID NO: 4606 - RNA, 19 nt, synthetic construct
  source 1..19: mol_type = other RNA
ttaaccctgagtggacaca

SEQ ID NO: 4607 - RNA, 19 nt, synthetic construct
  source 1..19: mol_type = other RNA
tttaaccctgagtggacac

SEQ ID NO: 4608 - RNA, 19 nt, synthetic construct
  source 1..19: mol_type = other RNA
atttaaccctgagtggaca

SEQ ID NO: 4609 - RNA, 19 nt, synthetic construct
  source 1..19: mol_type = other RNA
catttaaccctgagtggac

SEQ ID NO: 4610 - RNA, 19 nt, synthetic construct
  source 1..19: mol_type = other RNA
ccatttaaccctgagtgga

SEQ ID NO: 4611 - RNA, 19 nt, synthetic construct
  source 1..19: mol_type = other RNA
tccatttaaccctgagtgg

SEQ ID NO: 4612 - RNA, 19 nt, synthetic construct
  source 1..19: mol_type = other RNA
atccatttaaccctgagtg

SEQ ID NO: 4613 - RNA, 19 nt, synthetic construct
  source 1..19: mol_type = other RNA
aatccatttaaccctgagt

SEQ ID NO: 4614 - RNA, 19 nt, synthetic construct
  source 1..19: mol_type = other RNA
taatccatttaaccctgag

SEQ ID NO: 4615 - RNA, 19 nt, synthetic construct
  source 1..19: mol_type = other RNA
ttaatccatttaaccctga

SEQ ID NO: 4616 - RNA, 19 nt, synthetic construct
  source 1..19: mol_type = other RNA
cttaatccatttaaccctg

SEQ ID NO: 4617 - RNA, 19 nt, synthetic construct
  source 1..19: mol_type = other RNA
ccttaatccatttaaccct

SEQ ID NO: 4618 - RNA, 19 nt, synthetic construct
  source 1..19: mol_type = other RNA
cccttaatccatttaaccc

SEQ ID NO: 4619 - RNA, 19 nt, synthetic construct
  source 1..19: mol_type = other RNA
gcccttaatccatttaacc

SEQ ID NO: 4620 - RNA, 19 nt, synthetic construct
  source 1..19: mol_type = other RNA
cgcccttaatccatttaac

SEQ ID NO: 4621 - RNA, 19 nt, synthetic construct
  source 1..19: mol_type = other RNA
ccgcccttaatccatttaa

SEQ ID NO: 4622 - RNA, 19 nt, synthetic construct
  source 1..19: mol_type = other RNA
accgcccttaatccattta

SEQ ID NO: 4623 - RNA, 19 nt, synthetic construct
  source 1..19: mol_type = other RNA
caccgcccttaatccattt

SEQ ID NO: 4624 - RNA, 19 nt, synthetic construct
  source 1..19: mol_type = other RNA
gcaccgcccttaatccatt

SEQ ID NO: 4625 - RNA, 19 nt, synthetic construct
  source 1..19: mol_type = other RNA
tgcaccgcccttaatccat

SEQ ID NO: 4626 - RNA, 19 nt, synthetic construct
  source 1..19: mol_type = other RNA
ttgcaccgcccttaatcca

SEQ ID NO: 4627 - RNA, 19 nt, synthetic construct
  source 1..19: mol_type = other RNA
cttgcaccgcccttaatcc

SEQ ID NO: 4628 - RNA, 19 nt, synthetic construct
  source 1..19: mol_type = other RNA
ccttgcaccgcccttaatc

SEQ ID NO: 4629 - RNA, 19 nt, synthetic construct
  source 1..19: mol_type = other RNA
accttgcaccgcccttaat

SEQ ID NO: 4630 - RNA, 19 nt, synthetic construct
  source 1..19: mol_type = other RNA
caccttgcaccgcccttaa

SEQ ID NO: 4631 - RNA, 19 nt, synthetic construct
  source 1..19: mol_type = other RNA
acaccttgcaccgccctta

SEQ ID NO: 4632 - RNA, 19 nt, synthetic construct
  source 1..19: mol_type = other RNA
cacaccttgcaccgccctt

SEQ ID NO: 4633 - RNA, 19 nt, synthetic construct
  source 1..19: mol_type = other RNA
gcacaccttgcaccgccct

SEQ ID NO: 4634 - RNA, 19 nt, synthetic construct
  source 1..19: mol_type = other RNA
agcacaccttgcaccgccc

SEQ ID NO: 4635 - RNA, 19 nt, synthetic construct
  source 1..19: mol_type = other RNA
aagcacaccttgcaccgcc

SEQ ID NO: 4636 - RNA, 19 nt, synthetic construct
  source 1..19: mol_type = other RNA
aaagcacaccttgcaccgc

SEQ ID NO: 4637 - RNA, 19 nt, synthetic construct
  source 1..19: mol_type = other RNA
caaagcacaccttgcaccg

SEQ ID NO: 4638 - RNA, 19 nt, synthetic construct
  source 1..19: mol_type = other RNA
acaaagcacaccttgcacc

SEQ ID NO: 4639 - RNA, 19 nt, synthetic construct
  source 1..19: mol_type = other RNA
aacaaagcacaccttgcac

SEQ ID NO: 4640 - RNA, 19 nt, synthetic construct
  source 1..19: mol_type = other RNA
taacaaagcacaccttgca

SEQ ID NO: 4641 - RNA, 19 nt, synthetic construct
  source 1..19: mol_type = other RNA
ttaacaaagcacaccttgc

SEQ ID NO: 4642 - RNA, 19 nt, synthetic construct
  source 1..19: mol_type = other RNA
tttaacaaagcacaccttg

SEQ ID NO: 4643 - RNA, 19 nt, synthetic construct
  source 1..19: mol_type = other RNA
gtttaacaaagcacacctt

SEQ ID NO: 4644 - RNA, 19 nt, synthetic construct
  source 1..19: mol_type = other RNA
tgtttaacaaagcacacct

SEQ ID NO: 4645 - RNA, 19 nt, synthetic construct
  source 1..19: mol_type = other RNA
ctgtttaacaaagcacacc

SEQ ID NO: 4646 - RNA, 19 nt, synthetic construct
  source 1..19: mol_type = other RNA
tctgtttaacaaagcacac

SEQ ID NO: 4647 - RNA, 19 nt, synthetic construct
  source 1..19: mol_type = other RNA
atctgtttaacaaagcaca

SEQ ID NO: 4648 - RNA, 19 nt, synthetic construct
  source 1..19: mol_type = other RNA
catctgtttaacaaagcac

SEQ ID NO: 4649 - RNA, 19 nt, synthetic construct
  source 1..19: mol_type = other RNA
gcatctgtttaacaaagca

SEQ ID NO: 4650 - RNA, 19 nt, synthetic construct
  source 1..19: mol_type = other RNA
agcatctgtttaacaaagc

SEQ ID NO: 4651 - RNA, 19 nt, synthetic construct
  source 1..19: mol_type = other RNA
aagcatctgtttaacaaag

SEQ ID NO: 4652 - RNA, 19 nt, synthetic construct
  source 1..19: mol_type = other RNA
caagcatctgtttaacaaa

SEQ ID NO: 4653 - RNA, 19 nt, synthetic construct
  source 1..19: mol_type = other RNA
tcaagcatctgtttaacaa

SEQ ID NO: 4654 - RNA, 19 nt, synthetic construct
  source 1..19: mol_type = other RNA
ttcaagcatctgtttaaca

SEQ ID NO: 4655 - RNA, 19 nt, synthetic construct
  source 1..19: mol_type = other RNA
cttcaagcatctgtttaac

SEQ ID NO: 4656 - RNA, 19 nt, synthetic construct
  source 1..19: mol_type = other RNA
ccttcaagcatctgtttaa

SEQ ID NO: 4657 - RNA, 19 nt, synthetic construct
  source 1..19: mol_type = other RNA
gccttcaagcatctgttta

SEQ ID NO: 4658 - RNA, 19 nt, synthetic construct
  source 1..19: mol_type = other RNA
tgccttcaagcatctgttt

SEQ ID NO: 4659 - RNA, 19 nt, synthetic construct
  source 1..19: mol_type = other RNA
ctgccttcaagcatctgtt

SEQ ID NO: 4660 - RNA, 19 nt, synthetic construct
  source 1..19: mol_type = other RNA
gctgccttcaagcatctgt

SEQ ID NO: 4661 - RNA, 19 nt, synthetic construct
  source 1..19: mol_type = other RNA
tgctgccttcaagcatctg

SEQ ID NO: 4662 - RNA, 19 nt, synthetic construct
  source 1..19: mol_type = other RNA
atgctgccttcaagcatct

SEQ ID NO: 4663 - RNA, 19 nt, synthetic construct
  source 1..19: mol_type = other RNA
catgctgccttcaagcatc

SEQ ID NO: 4664 - RNA, 19 nt, synthetic construct
  source 1..19: mol_type = other RNA
gcatgctgccttcaagcat

SEQ ID NO: 4665 - RNA, 19 nt, synthetic construct
  source 1..19: mol_type = other RNA
agcatgctgccttcaagca

SEQ ID NO: 4666 - RNA, 19 nt, synthetic construct
  source 1..19: mol_type = other RNA
gagcatgctgccttcaagc

SEQ ID NO: 4667 - RNA, 19 nt, synthetic construct
  source 1..19: mol_type = other RNA
cgagcatgctgccttcaag

SEQ ID NO: 4668 - RNA, 19 nt, synthetic construct
  source 1..19: mol_type = other RNA
acgagcatgctgccttcaa

SEQ ID NO: 4669 - RNA, 19 nt, synthetic construct
  source 1..19: mol_type = other RNA
aacgagcatgctgccttca

SEQ ID NO: 4670 - RNA, 19 nt, synthetic construct
  source 1..19: mol_type = other RNA
taacgagcatgctgccttc

SEQ ID NO: 4671 - RNA, 19 nt, synthetic construct
  source 1..19: mol_type = other RNA
ttaacgagcatgctgcctt

SEQ ID NO: 4672 - RNA, 19 nt, synthetic construct
  source 1..19: mol_type = other RNA
cttaacgagcatgctgcct

SEQ ID NO: 4673 - RNA, 19 nt, synthetic construct
  source 1..19: mol_type = other RNA
tcttaacgagcatgctgcc

SEQ ID NO: 4674 - RNA, 19 nt, synthetic construct
  source 1..19: mol_type = other RNA
ctcttaacgagcatgctgc

SEQ ID NO: 4675 - RNA, 19 nt, synthetic construct
  source 1..19: mol_type = other RNA
actcttaacgagcatgctg

SEQ ID NO: 4676 - RNA, 19 nt, synthetic construct
  source 1..19: mol_type = other RNA
gactcttaacgagcatgct

SEQ ID NO: 4677 - RNA, 19 nt, synthetic construct
  source 1..19: mol_type = other RNA
tgactcttaacgagcatgc

SEQ ID NO: 4678 - RNA, 19 nt, synthetic construct
  source 1..19: mol_type = other RNA
atgactcttaacgagcatg

SEQ ID NO: 4679 - RNA, 19 nt, synthetic construct
  source 1..19: mol_type = other RNA
gatgactcttaacgagcat

SEQ ID NO: 4680 - RNA, 19 nt, synthetic construct
  source 1..19: mol_type = other RNA
tgatgactcttaacgagca

SEQ ID NO: 4681 - RNA, 19 nt, synthetic construct
  source 1..19: mol_type = other RNA
gtgatgactcttaacgagc

SEQ ID NO: 4682 - RNA, 19 nt, synthetic construct
  source 1..19: mol_type = other RNA
ggtgatgactcttaacgag

SEQ ID NO: 4683 - RNA, 19 nt, synthetic construct
  source 1..19: mol_type = other RNA
tggtgatgactcttaacga

SEQ ID NO: 4684 - RNA, 19 nt, synthetic construct
  source 1..19: mol_type = other RNA
gtggtgatgactcttaacg

SEQ ID NO: 4685 - RNA, 19 nt, synthetic construct
  source 1..19: mol_type = other RNA
agtggtgatgactcttaac

SEQ ID NO: 4686 - RNA, 19 nt, synthetic construct
  source 1..19: mol_type = other RNA
gagtggtgatgactcttaa

SEQ ID NO: 4687 - RNA, 19 nt, synthetic construct
  source 1..19: mol_type = other RNA
ggagtggtgatgactctta

SEQ ID NO: 4688 - RNA, 19 nt, synthetic construct
  source 1..19: mol_type = other RNA
gggagtggtgatgactctt

SEQ ID NO: 4689 - RNA, 19 nt, synthetic construct
  source 1..19: mol_type = other RNA
agggagtggtgatgactct

SEQ ID NO: 4690 - RNA, 19 nt, synthetic construct
  source 1..19: mol_type = other RNA
tagggagtggtgatgactc

SEQ ID NO: 4691 - RNA, 19 nt, synthetic construct
  source 1..19: mol_type = other RNA
ttagggagtggtgatgact

SEQ ID NO: 4692 - RNA, 19 nt, synthetic construct
  source 1..19: mol_type = other RNA
attagggagtggtgatgac

SEQ ID NO: 4693 - RNA, 19 nt, synthetic construct
  source 1..19: mol_type = other RNA
gattagggagtggtgatga

SEQ ID NO: 4694 - RNA, 19 nt, synthetic construct
  source 1..19: mol_type = other RNA
agattagggagtggtgatg

SEQ ID NO: 4695 - RNA, 19 nt, synthetic construct
  source 1..19: mol_type = other RNA
gagattagggagtggtgat

SEQ ID NO: 4696 - RNA, 19 nt, synthetic construct
  source 1..19: mol_type = other RNA
tgagattagggagtggtga

SEQ ID NO: 4697 - RNA, 19 nt, synthetic construct
  source 1..19: mol_type = other RNA
ttgagattagggagtggtg

SEQ ID NO: 4698 - RNA, 19 nt, synthetic construct
  source 1..19: mol_type = other RNA
cttgagattagggagtggt

SEQ ID NO: 4699 - RNA, 19 nt, synthetic construct
  source 1..19: mol_type = other RNA
acttgagattagggagtgg

SEQ ID NO: 4700 - RNA, 19 nt, synthetic construct
  source 1..19: mol_type = other RNA
tacttgagattagggagtg

SEQ ID NO: 4701 - RNA, 19 nt, synthetic construct
  source 1..19: mol_type = other RNA
gtacttgagattagggagt

SEQ ID NO: 4702 - RNA, 19 nt, synthetic construct
  source 1..19: mol_type = other RNA
ggtacttgagattagggag

SEQ ID NO: 4703 - RNA, 19 nt, synthetic construct
  source 1..19: mol_type = other RNA
gggtacttgagattaggga

SEQ ID NO: 4704 - RNA, 19 nt, synthetic construct
  source 1..19: mol_type = other RNA
tgggtacttgagattaggg

SEQ ID NO: 4705 - RNA, 19 nt, synthetic construct
  source 1..19: mol_type = other RNA
ctgggtacttgagattagg

SEQ ID NO: 4706 - RNA, 19 nt, synthetic construct
  source 1..19: mol_type = other RNA
cctgggtacttgagattag

SEQ ID NO: 4707 - RNA, 19 nt, synthetic construct
  source 1..19: mol_type = other RNA
ccctgggtacttgagatta

SEQ ID NO: 4708 - RNA, 19 nt, synthetic construct
  source 1..19: mol_type = other RNA
tccctgggtacttgagatt

SEQ ID NO: 4709 - RNA, 19 nt, synthetic construct
  source 1..19: mol_type = other RNA
gtccctgggtacttgagat

SEQ ID NO: 4710 - RNA, 19 nt, synthetic construct
  source 1..19: mol_type = other RNA
tgtccctgggtacttgaga

SEQ ID NO: 4711 - RNA, 19 nt, synthetic construct
  source 1..19: mol_type = other RNA
gtgtccctgggtacttgag

SEQ ID NO: 4712 - RNA, 19 nt, synthetic construct
  source 1..19: mol_type = other RNA
tgtgtccctgggtacttga

SEQ ID NO: 4713 - RNA, 19 nt, synthetic construct
  source 1..19: mol_type = other RNA
ttgtgtccctgggtacttg

SEQ ID NO: 4714 - RNA, 19 nt, synthetic construct
  source 1..19: mol_type = other RNA
tttgtgtccctgggtactt

SEQ ID NO: 4715 - RNA, 19 nt, synthetic construct
  source 1..19: mol_type = other RNA
gtttgtgtccctgggtact

SEQ ID NO: 4716 - RNA, 19 nt, synthetic construct
  source 1..19: mol_type = other RNA
tgtttgtgtccctgggtac

SEQ ID NO: 4717 - RNA, 19 nt, synthetic construct
  source 1..19: mol_type = other RNA
gtgtttgtgtccctgggta

SEQ ID NO: 4718 - RNA, 19 nt, synthetic construct
  source 1..19: mol_type = other RNA
ggtgtttgtgtccctgggt

SEQ ID NO: 4719 - RNA, 19 nt, synthetic construct
  source 1..19: mol_type = other RNA
aggtgtttgtgtccctggg

SEQ ID NO: 4720 - RNA, 19 nt, synthetic construct
  source 1..19: mol_type = other RNA
gaggtgtttgtgtccctgg

SEQ ID NO: 4721 - RNA, 19 nt, synthetic construct
  source 1..19: mol_type = other RNA
cgaggtgtttgtgtccctg

SEQ ID NO: 4722 - RNA, 19 nt, synthetic construct
  source 1..19: mol_type = other RNA
ccgaggtgtttgtgtccct

SEQ ID NO: 4723 - RNA, 19 nt, synthetic construct
  source 1..19: mol_type = other RNA
tccgaggtgtttgtgtccc

SEQ ID NO: 4724 - RNA, 19 nt, synthetic construct
  source 1..19: mol_type = other RNA
ttccgaggtgtttgtgtcc

SEQ ID NO: 4725 - RNA, 19 nt, synthetic construct
  source 1..19: mol_type = other RNA
cttccgaggtgtttgtgtc

SEQ ID NO: 4726 - RNA, 19 nt, synthetic construct
  source 1..19: mol_type = other RNA
ccttccgaggtgtttgtgt

SEQ ID NO: 4727 - RNA, 19 nt, synthetic construct
  source 1..19: mol_type = other RNA
gccttccgaggtgtttgtg

SEQ ID NO: 4728 - RNA, 19 nt, synthetic construct
  source 1..19: mol_type = other RNA
ggccttccgaggtgtttgt

SEQ ID NO: 4729 - RNA, 19 nt, synthetic construct
  source 1..19: mol_type = other RNA
cggccttccgaggtgtttg

SEQ ID NO: 4730 - RNA, 19 nt, synthetic construct
  source 1..19: mol_type = other RNA
gcggccttccgaggtgttt

SEQ ID NO: 4731 - RNA, 19 nt, synthetic construct
  source 1..19: mol_type = other RNA
tgcggccttccgaggtgtt

SEQ ID NO: 4732 - RNA, 19 nt, synthetic construct
  source 1..19: mol_type = other RNA
ctgcggccttccgaggtgt

SEQ ID NO: 4733 - RNA, 19 nt, synthetic construct
  source 1..19: mol_type = other RNA
cctgcggccttccgaggtg

SEQ ID NO: 4734 - RNA, 19 nt, synthetic construct
  source 1..19: mol_type = other RNA
ccctgcggccttccgaggt

SEQ ID NO: 4735 - RNA, 19 nt, synthetic construct
  source 1..19: mol_type = other RNA
accctgcggccttccgagg

SEQ ID NO: 4736 - RNA, 19 nt, synthetic construct
  source 1..19: mol_type = other RNA
gaccctgcggccttccgag

SEQ ID NO: 4737 - RNA, 19 nt, synthetic construct
  source 1..19: mol_type = other RNA
ggaccctgcggccttccga

SEQ ID NO: 4738 - RNA, 19 nt, synthetic construct
  source 1..19: mol_type = other RNA
aggaccctgcggccttccg

SEQ ID NO: 4739 - RNA, 19 nt, synthetic construct
  source 1..19: mol_type = other RNA
gaggaccctgcggccttcc

SEQ ID NO: 4740 - RNA, 19 nt, synthetic construct
  source 1..19: mol_type = other RNA
agaggaccctgcggccttc

SEQ ID NO: 4741 - RNA, 19 nt, synthetic construct
  source 1..19: mol_type = other RNA
cagaggaccctgcggcctt

SEQ ID NO: 4742 - RNA, 19 nt, synthetic construct
  source 1..19: mol_type = other RNA
gcagaggaccctgcggcct

SEQ ID NO: 4743 - RNA, 19 nt, synthetic construct
  source 1..19: mol_type = other RNA
ggcagaggaccctgcggcc

SEQ ID NO: 4744 - RNA, 19 nt, synthetic construct
  source 1..19: mol_type = other RNA
aggcagaggaccctgcggc

SEQ ID NO: 4745 - RNA, 19 nt, synthetic construct
  source 1..19: mol_type = other RNA
taggcagaggaccctgcgg

SEQ ID NO: 4746 - RNA, 19 nt, synthetic construct
  source 1..19: mol_type = other RNA
ctaggcagaggaccctgcg

SEQ ID NO: 4747 - RNA, 19 nt, synthetic construct
  source 1..19: mol_type = other RNA
cctaggcagaggaccctgc

SEQ ID NO: 4748 - RNA, 19 nt, synthetic construct
  source 1..19: mol_type = other RNA
tcctaggcagaggaccctg

SEQ ID NO: 4749 - RNA, 19 nt, synthetic construct
  source 1..19: mol_type = other RNA
ttcctaggcagaggaccct

SEQ ID NO: 4750 - RNA, 19 nt, synthetic construct
  source 1..19: mol_type = other RNA
tttcctaggcagaggaccc

SEQ ID NO: 4751 - RNA, 19 nt, synthetic construct
  source 1..19: mol_type = other RNA
ttttcctaggcagaggacc

SEQ ID NO: 4752 - RNA, 19 nt, synthetic construct
  source 1..19: mol_type = other RNA
gttttcctaggcagaggac

SEQ ID NO: 4753 - RNA, 19 nt, synthetic construct
  source 1..19: mol_type = other RNA
ggttttcctaggcagagga

SEQ ID NO: 4754 - RNA, 19 nt, synthetic construct
  source 1..19: mol_type = other RNA
tggttttcctaggcagagg

SEQ ID NO: 4755 - RNA, 19 nt, synthetic construct
  source 1..19: mol_type = other RNA
ctggttttcctaggcagag

SEQ ID NO: 4756 - RNA, 19 nt, synthetic construct
  source 1..19: mol_type = other RNA
tctggttttcctaggcaga

SEQ ID NO: 4757 - RNA, 19 nt, synthetic construct
  source 1..19: mol_type = other RNA
ctctggttttcctaggcag

SEQ ID NO: 4758 - RNA, 19 nt, synthetic construct
  source 1..19: mol_type = other RNA
tctctggttttcctaggca

SEQ ID NO: 4759 - RNA, 19 nt, synthetic construct
  source 1..19: mol_type = other RNA
gtctctggttttcctaggc

SEQ ID NO: 4760 - RNA, 19 nt, synthetic construct
  source 1..19: mol_type = other RNA
ggtctctggttttcctagg

SEQ ID NO: 4761 - RNA, 19 nt, synthetic construct
  source 1..19: mol_type = other RNA
aggtctctggttttcctag

SEQ ID NO: 4762 - RNA, 19 nt, synthetic construct
  source 1..19: mol_type = other RNA
aaggtctctggttttccta

SEQ ID NO: 4763 - RNA, 19 nt, synthetic construct
  source 1..19: mol_type = other RNA
aaaggtctctggttttcct

SEQ ID NO: 4764 - RNA, 19 nt, synthetic construct
  source 1..19: mol_type = other RNA
caaaggtctctggttttcc

SEQ ID NO: 4765 - RNA, 19 nt, synthetic construct
  source 1..19: mol_type = other RNA
acaaaggtctctggttttc

SEQ ID NO: 4766 - RNA, 19 nt, synthetic construct
  source 1..19: mol_type = other RNA
aacaaaggtctctggtttt

SEQ ID NO: 4767 - RNA, 19 nt, synthetic construct
  source 1..19: mol_type = other RNA
gaacaaaggtctctggttt

SEQ ID NO: 4768 - RNA, 19 nt, synthetic construct
  source 1..19: mol_type = other RNA
tgaacaaaggtctctggtt

SEQ ID NO: 4769 - RNA, 19 nt, synthetic construct
  source 1..19: mol_type = other RNA
gtgaacaaaggtctctggt

SEQ ID NO: 4770 - RNA, 19 nt, synthetic construct
  source 1..19: mol_type = other RNA
agtgaacaaaggtctctgg

SEQ ID NO: 4771 - RNA, 19 nt, synthetic construct
  source 1..19: mol_type = other RNA
aagtgaacaaaggtctctg

SEQ ID NO: 4772 - RNA, 19 nt, synthetic construct
  source 1..19: mol_type = other RNA
caagtgaacaaaggtctct

SEQ ID NO: 4773 - RNA, 19 nt, synthetic construct
  source 1..19: mol_type = other RNA
acaagtgaacaaaggtctc

SEQ ID NO: 4774 - RNA, 19 nt, synthetic construct
  source 1..19: mol_type = other RNA
aacaagtgaacaaaggtct

SEQ ID NO: 4775 - RNA, 19 nt, synthetic construct
  source 1..19: mol_type = other RNA
aaacaagtgaacaaaggtc

SEQ ID NO: 4776 - RNA, 19 nt, synthetic construct
  source 1..19: mol_type = other RNA
taaacaagtgaacaaaggt

SEQ ID NO: 4777 - RNA, 19 nt, synthetic construct
  source 1..19: mol_type = other RNA
ataaacaagtgaacaaagg

SEQ ID NO: 4778 - RNA, 19 nt, synthetic construct
  source 1..19: mol_type = other RNA
gataaacaagtgaacaaag

SEQ ID NO: 4779 - RNA, 19 nt, synthetic construct
  source 1..19: mol_type = other RNA
agataaacaagtgaacaaa

SEQ ID NO: 4780 - RNA, 19 nt, synthetic construct
  source 1..19: mol_type = other RNA
cagataaacaagtgaacaa

SEQ ID NO: 4781 - RNA, 19 nt, synthetic construct
  source 1..19: mol_type = other RNA
gcagataaacaagtgaaca

SEQ ID NO: 4782 - RNA, 19 nt, synthetic construct
  source 1..19: mol_type = other RNA
agcagataaacaagtgaac

SEQ ID NO: 4783 - RNA, 19 nt, synthetic construct
  source 1..19: mol_type = other RNA
cagcagataaacaagtgaa

SEQ ID NO: 4784 - RNA, 19 nt, synthetic construct
  source 1..19: mol_type = other RNA
tcagcagataaacaagtga

SEQ ID NO: 4785 - RNA, 19 nt, synthetic construct
  source 1..19: mol_type = other RNA
gtcagcagataaacaagtg

SEQ ID NO: 4786 - RNA, 19 nt, synthetic construct
  source 1..19: mol_type = other RNA
ggtcagcagataaacaagt

SEQ ID NO: 4787 - RNA, 19 nt, synthetic construct
  source 1..19: mol_type = other RNA
aggtcagcagataaacaag

SEQ ID NO: 4788 - RNA, 19 nt, synthetic construct
  source 1..19: mol_type = other RNA
aaggtcagcagataaacaa

SEQ ID NO: 4789 - RNA, 19 nt, synthetic construct
  source 1..19: mol_type = other RNA
gaaggtcagcagataaaca

SEQ ID NO: 4790 - RNA, 19 nt, synthetic construct
  source 1..19: mol_type = other RNA
ggaaggtcagcagataaac

SEQ ID NO: 4791 - RNA, 19 nt, synthetic construct
  source 1..19: mol_type = other RNA
gggaaggtcagcagataaa

SEQ ID NO: 4792 - RNA, 19 nt, synthetic construct
  source 1..19: mol_type = other RNA
agggaaggtcagcagataa

SEQ ID NO: 4793 - RNA, 19 nt, synthetic construct
  source 1..19: mol_type = other RNA
gagggaaggtcagcagata

SEQ ID NO: 4794 - RNA, 19 nt, synthetic construct
  source 1..19: mol_type = other RNA
ggagggaaggtcagcagat

SEQ ID NO: 4795 - RNA, 19 nt, synthetic construct
  source 1..19: mol_type = other RNA
tggagggaaggtcagcaga

SEQ ID NO: 4796 - RNA, 19 nt, synthetic construct
  source 1..19: mol_type = other RNA
gtggagggaaggtcagcag

SEQ ID NO: 4797 - RNA, 19 nt, synthetic construct
  source 1..19: mol_type = other RNA
agtggagggaaggtcagca

SEQ ID NO: 4798 - RNA, 19 nt, synthetic construct
  source 1..19: mol_type = other RNA
tagtggagggaaggtcagc

SEQ ID NO: 4799 - RNA, 19 nt, synthetic construct
  source 1..19: mol_type = other RNA
atagtggagggaaggtcag

SEQ ID NO: 4800 - RNA, 19 nt, synthetic construct
  source 1..19: mol_type = other RNA
aatagtggagggaaggtca

SEQ ID NO: 4801 - RNA, 19 nt, synthetic construct
  source 1..19: mol_type = other RNA
caatagtggagggaaggtc

SEQ ID NO: 4802 - RNA, 19 nt, synthetic construct
  source 1..19: mol_type = other RNA
acaatagtggagggaaggt

SEQ ID NO: 4803 - RNA, 19 nt, synthetic construct
  source 1..19: mol_type = other RNA
gacaatagtggagggaagg

SEQ ID NO: 4804 - RNA, 19 nt, synthetic construct
  source 1..19: mol_type = other RNA
ggacaatagtggagggaag

SEQ ID NO: 4805 - RNA, 19 nt, synthetic construct
  source 1..19: mol_type = other RNA
aggacaatagtggagggaa

SEQ ID NO: 4806 - RNA, 19 nt, synthetic construct
  source 1..19: mol_type = other RNA
taggacaatagtggaggga

SEQ ID NO: 4807 - RNA, 19 nt, synthetic construct
  source 1..19: mol_type = other RNA
ataggacaatagtggaggg

SEQ ID NO: 4808 - RNA, 19 nt, synthetic construct
  source 1..19: mol_type = other RNA
cataggacaatagtggagg

SEQ ID NO: 4809 - RNA, 19 nt, synthetic construct
  source 1..19: mol_type = other RNA
tcataggacaatagtggag

SEQ ID NO: 4810 - RNA, 19 nt, synthetic construct
  source 1..19: mol_type = other RNA
gtcataggacaatagtgga

SEQ ID NO: 4811 - RNA, 19 nt, synthetic construct
  source 1..19: mol_type = other RNA
ggtcataggacaatagtgg

SEQ ID NO: 4812 - RNA, 19 nt, synthetic construct
  source 1..19: mol_type = other RNA
gggtcataggacaatagtg

SEQ ID NO: 4813 - RNA, 19 nt, synthetic construct
  source 1..19: mol_type = other RNA
agggtcataggacaatagt

SEQ ID NO: 4814 - RNA, 19 nt, synthetic construct
  source 1..19: mol_type = other RNA
cagggtcataggacaatag

SEQ ID NO: 4815 - RNA, 19 nt, synthetic construct
  source 1..19: mol_type = other RNA
gcagggtcataggacaata

SEQ ID NO: 4816 - RNA, 19 nt, synthetic construct
  source 1..19: mol_type = other RNA
ggcagggtcataggacaat

SEQ ID NO: 4817 - RNA, 19 nt, synthetic construct
  source 1..19: mol_type = other RNA
tggcagggtcataggacaa

SEQ ID NO: 4818 - RNA, 19 nt, synthetic construct
  source 1..19: mol_type = other RNA
ttggcagggtcataggaca

SEQ ID NO: 4819 - RNA, 19 nt, synthetic construct
  source 1..19: mol_type = other RNA
tttggcagggtcataggac

SEQ ID NO: 4820 - RNA, 19 nt, synthetic construct
  source 1..19: mol_type = other RNA
atttggcagggtcatagga

SEQ ID NO: 4821 - RNA, 19 nt, synthetic construct
  source 1..19: mol_type = other RNA
gatttggcagggtcatagg

SEQ ID NO: 4822 - RNA, 19 nt, synthetic construct
  source 1..19: mol_type = other RNA
ggatttggcagggtcatag

SEQ ID NO: 4823 - RNA, 19 nt, synthetic construct
  source 1..19: mol_type = other RNA
gggatttggcagggtcata

SEQ ID NO: 4824 - RNA, 19 nt, synthetic construct
  source 1..19: mol_type = other RNA
ggggatttggcagggtcat

SEQ ID NO: 4825 - RNA, 19 nt, synthetic construct
  source 1..19: mol_type = other RNA
gggggatttggcagggtca

SEQ ID NO: 4826 - RNA, 19 nt, synthetic construct
  source 1..19: mol_type = other RNA
agggggatttggcagggtc

SEQ ID NO: 4827 - RNA, 19 nt, synthetic construct
  source 1..19: mol_type = other RNA
gagggggatttggcagggt

SEQ ID NO: 4828 - RNA, 19 nt, synthetic construct
  source 1..19: mol_type = other RNA
agagggggatttggcaggg

SEQ ID NO: 4829 - RNA, 19 nt, synthetic construct
  source 1..19: mol_type = other RNA
cagagggggatttggcagg

SEQ ID NO: 4830 - RNA, 19 nt, synthetic construct
  source 1..19: mol_type = other RNA
acagagggggatttggcag

SEQ ID NO: 4831 - RNA, 19 nt, synthetic construct
  source 1..19: mol_type = other RNA
cacagagggggatttggca

SEQ ID NO: 4832 - RNA, 19 nt, synthetic construct
  source 1..19: mol_type = other RNA
tcacagagggggatttggc

SEQ ID NO: 4833 - RNA, 19 nt, synthetic construct
  source 1..19: mol_type = other RNA
ctcacagagggggatttgg

SEQ ID NO: 4834 - RNA, 19 nt, synthetic construct
  source 1..19: mol_type = other RNA
tctcacagagggggatttg

SEQ ID NO: 4835 - RNA, 19 nt, synthetic construct
  source 1..19: mol_type = other RNA
ttctcacagagggggattt

SEQ ID NO: 4836 - RNA, 19 nt, synthetic construct
  source 1..19: mol_type = other RNA
tttctcacagagggggatt

SEQ ID NO: 4837 - RNA, 19 nt, synthetic construct
  source 1..19: mol_type = other RNA
gtttctcacagagggggat

SEQ ID NO: 4838 - RNA, 19 nt, synthetic construct
  source 1..19: mol_type = other RNA
tgtttctcacagaggggga

SEQ ID NO: 4839 - RNA, 19 nt, synthetic construct
  source 1..19: mol_type = other RNA
gtgtttctcacagaggggg

SEQ ID NO: 4840 - RNA, 19 nt, synthetic construct
  source 1..19: mol_type = other RNA
ggtgtttctcacagagggg

SEQ ID NO: 4841 - RNA, 19 nt, synthetic construct
  source 1..19: mol_type = other RNA
gggtgtttctcacagaggg

SEQ ID NO: 4842 - RNA, 19 nt, synthetic construct
  source 1..19: mol_type = other RNA
tgggtgtttctcacagagg

SEQ ID NO: 4843 - RNA, 19 nt, synthetic construct
  source 1..19: mol_type = other RNA
ttgggtgtttctcacagag

SEQ ID NO: 4844 - RNA, 19 nt, synthetic construct
  source 1..19: mol_type = other RNA
cttgggtgtttctcacaga

SEQ ID NO: 4845 - RNA, 19 nt, synthetic construct
  source 1..19: mol_type = other RNA
tcttgggtgtttctcacag

SEQ ID NO: 4846 - RNA, 19 nt, synthetic construct
  source 1..19: mol_type = other RNA
ttcttgggtgtttctcaca

SEQ ID NO: 4847 - RNA, 19 nt, synthetic construct
  source 1..19: mol_type = other RNA
attcttgggtgtttctcac

SEQ ID NO: 4848 - RNA, 19 nt, synthetic construct
  source 1..19: mol_type = other RNA
cattcttgggtgtttctca

SEQ ID NO: 4849 - RNA, 19 nt, synthetic construct
  source 1..19: mol_type = other RNA
ccattcttgggtgtttctc

SEQ ID NO: 4850 - RNA, 19 nt, synthetic construct
  source 1..19: mol_type = other RNA
accattcttgggtgtttct

SEQ ID NO: 4851 - RNA, 19 nt, synthetic construct
  source 1..19: mol_type = other RNA
gaccattcttgggtgtttc

SEQ ID NO: 4852 - RNA, 19 nt, synthetic construct
  source 1..19: mol_type = other RNA
tgaccattcttgggtgttt

SEQ ID NO: 4853 - RNA, 19 nt, synthetic construct
  source 1..19: mol_type = other RNA
ttgaccattcttgggtgtt

SEQ ID NO: 4854 - RNA, 19 nt, synthetic construct
  source 1..19: mol_type = other RNA
attgaccattcttgggtgt

SEQ ID NO: 4855 - RNA, 19 nt, synthetic construct
  source 1..19: mol_type = other RNA
tattgaccattcttgggtg

SEQ ID NO: 4856 - RNA, 19 nt, synthetic construct
  source 1..19: mol_type = other RNA
ttattgaccattcttgggt

SEQ ID NO: 4857 - RNA, 19 nt, synthetic construct
  source 1..19: mol_type = other RNA
tttattgaccattcttggg

SEQ ID NO: 4858 - RNA, 19 nt, synthetic construct
  source 1..19: mol_type = other RNA
ttttattgaccattcttgg

SEQ ID NO: 4859 - RNA, 19 nt, synthetic construct
  source 1..19: mol_type = other RNA
tttttattgaccattcttg

SEQ ID NO: 4860 - RNA, 19 nt, synthetic construct
  source 1..19: mol_type = other RNA
ttttttattgaccattctt

SEQ ID NO: 4861 - RNA, 19 nt, synthetic construct
  source 1..19: mol_type = other RNA
attttttattgaccattct

SEQ ID NO: 4862 - RNA, 19 nt, synthetic construct
  source 1..19: mol_type = other RNA
aattttttattgaccattc

SEQ ID NO: 4863 - RNA, 19 nt, synthetic construct
  source 1..19: mol_type = other RNA
taattttttattgaccatt

SEQ ID NO: 4864 - RNA, 19 nt, synthetic construct
  source 1..19: mol_type = other RNA
ttaattttttattgaccat

SEQ ID NO: 4865 - RNA, 19 nt, synthetic construct
  source 1..19: mol_type = other RNA
tttaattttttattgacca

SEQ ID NO: 4866 - RNA, 19 nt, synthetic construct
  source 1..19: mol_type = other RNA
atttaattttttattgacc

SEQ ID NO: 4867 - RNA, 19 nt, synthetic construct
  source 1..19: mol_type = other RNA
tatttaattttttattgac

SEQ ID NO: 4868 - RNA, 19 nt, synthetic construct
  source 1..19: mol_type = other RNA
ttatttaattttttattga

SEQ ID NO: 4869 - RNA, 19 nt, synthetic construct
  source 1..19: mol_type = other RNA
tttatttaattttttattg

SEQ ID NO: 4870 - RNA, 19 nt, synthetic construct
  source 1..19: mol_type = other RNA
atttatttaattttttatt

SEQ ID NO: 4871 - RNA, 19 nt, synthetic construct
  source 1..19: mol_type = other RNA
tatttatttaattttttat

SEQ ID NO: 4872 - RNA, 19 nt, synthetic construct
  source 1..19: mol_type = other RNA
ttatttatttaatttttta

SEQ ID NO: 4873 - RNA, 19 nt, synthetic construct
  source 1..19: mol_type = other RNA
tttatttatttaatttttt

SEQ ID NO: 4874 - RNA, 19 nt, synthetic construct
  source 1..19: mol_type = other RNA
atttatttatttaattttt

SEQ ID NO: 4875 - RNA, 19 nt, synthetic construct
  source 1..19: mol_type = other RNA
tatttatttatttaatttt

SEQ ID NO: 4876 - RNA, 19 nt, synthetic construct
  source 1..19: mol_type = other RNA
ttatttatttatttaattt

SEQ ID NO: 4877 - RNA, 19 nt, synthetic construct
  source 1..19: mol_type = other RNA
tttatttatttatttaatt

SEQ ID NO: 4878 - RNA, 19 nt, synthetic construct
  source 1..19: mol_type = other RNA
atttatttatttatttaat

SEQ ID NO: 4879 - RNA, 19 nt, synthetic construct
  source 1..19: mol_type = other RNA
tatttatttatttatttaa

SEQ ID NO: 4880 - RNA, 19 nt, synthetic construct
  source 1..19: mol_type = other RNA
ttatttatttatttattta

SEQ ID NO: 4881 - RNA, 19 nt, synthetic construct
  source 1..19: mol_type = other RNA
tttatttatttatttattt

SEQ ID NO: 4882 - RNA, 19 nt, synthetic construct
  source 1..19: mol_type = other RNA
atttatttatttatttatt

SEQ ID NO: 4883 - RNA, 19 nt, synthetic construct
  source 1..19: mol_type = other RNA
tatttatttatttatttat

SEQ ID NO: 4884 - RNA, 19 nt, synthetic construct
  source 1..19: mol_type = other RNA
ttatttatttatttattta

SEQ ID NO: 4885 - RNA, 19 nt, synthetic construct
  source 1..19: mol_type = other RNA
tttatttatttatttattt

SEQ ID NO: 4886 - RNA, 19 nt, synthetic construct
  source 1..19: mol_type = other RNA
atttatttatttatttatt

SEQ ID NO: 4887 - RNA, 19 nt, synthetic construct
  source 1..19: mol_type = other RNA
tatttatttatttatttat

SEQ ID NO: 4888 - RNA, 19 nt, synthetic construct
  source 1..19: mol_type = other RNA
ttatttatttatttattta

SEQ ID NO: 4889 - RNA, 19 nt, synthetic construct
  source 1..19: mol_type = other RNA
tttatttatttatttattt

SEQ ID NO: 4890 - RNA, 19 nt, synthetic construct
  source 1..19: mol_type = other RNA
ttttatttatttatttatt

SEQ ID NO: 4891 - RNA, 19 nt, synthetic construct
  source 1..19: mol_type = other RNA
tttttatttatttatttat

SEQ ID NO: 4892 - RNA, 19 nt, synthetic construct
  source 1..19: mol_type = other RNA
ctttttatttatttattta

SEQ ID NO: 4893 - RNA, 19 nt, synthetic construct
  source 1..19: mol_type = other RNA
actttttatttatttattt

SEQ ID NO: 4894 - RNA, 19 nt, synthetic construct
  source 1..19: mol_type = other RNA
tactttttatttatttatt

SEQ ID NO: 4895 - RNA, 21 nt, synthetic construct
  source 1..21: mol_type = other RNA
  modified_base 1: mod_base = OTHER; note = 2'-O-methyl modified nucleoside
  modified_base 2: mod_base = OTHER; note = 2'-O-methyl modified nucleoside
  modified_base 3: mod_base = OTHER; note = 2'-O-methyl modified nucleoside
  modified_base 4: mod_base = OTHER; note = 2'-O-methyl modified nucleoside
  modified_base 5: mod_base = OTHER; note = 2'-fluoro-modified nucleoside
  modified_base 6: mod_base = OTHER; note = 2'-fluoro-modified nucleoside
  modified_base 7: mod_base = OTHER; note = 2'-O-methyl modified nucleoside
  modified_base 8: mod_base = OTHER; note = 2'-O-methyl modified nucleoside
  modified_base 9: mod_base = OTHER; note = 2'-fluoro-modified nucleoside
  modified_base 10: mod_base = OTHER; note = 2'-O-methyl modified nucleoside
  modified_base 11: mod_base = OTHER; note = 2'-fluoro-modified nucleoside
  modified_base 12: mod_base = OTHER; note = 2'-O-methyl modified nucleoside
  modified_base 13: mod_base = OTHER; note = 2'-O-methyl modified nucleoside
  modified_base 14: mod_base = OTHER; note = 2'-O-methyl modified nucleoside
  modified_base 15: mod_base = OTHER; note = 2'-O-methyl modified nucleoside
  modified_base 16: mod_base = OTHER; note = 2'-O-methyl modified nucleoside
  modified_base 17: mod_base = OTHER; note = 2'-O-methyl modified nucleoside
  modified_base 18: mod_base = OTHER; note = 2'-O-methyl modified nucleoside
  modified_base 19: mod_base = OTHER; note = 2'-O-methyl modified nucleoside with phosphorothioate linkage
  modified_base 20: mod_base = OTHER; note = 2'-O-methyl modified nucleoside with phosphorothioate linkage
  modified_base 21: mod_base = OTHER; note = 2'-O-methyl modified nucleoside
gttctcaacacatcctttatt

SEQ ID NO: 4896 - RNA, 21 nt, synthetic construct
  source 1..21: mol_type = other RNA
  modified_base 1: mod_base = OTHER; note = 2'-O-methyl modified nucleoside
  modified_base 2: mod_base = OTHER; note = 2'-O-methyl modified nucleoside
  modified_base 3: mod_base = OTHER; note = 2'-O-methyl modified nucleoside
  modified_base 4: mod_base = OTHER; note = 2'-O-methyl modified nucleoside
  modified_base 5: mod_base = OTHER; note = 2'-fluoro-modified nucleoside
  modified_base 6: mod_base = OTHER; note = 2'-fluoro-modified nucleoside
  modified_base 7: mod_base = OTHER; note = 2'-O-methyl modified nucleoside
  modified_base 8: mod_base = OTHER; note = 2'-O-methyl modified nucleoside
  modified_base 9: mod_base = OTHER; note = 2'-fluoro-modified nucleoside
  modified_base 10: mod_base = OTHER; note = 2'-O-methyl modified nucleoside
  modified_base 11: mod_base = OTHER; note = 2'-O-methyl modified nucleoside
  modified_base 12: mod_base = OTHER; note = 2'-O-methyl modified nucleoside
  modified_base 13: mod_base = OTHER; note = 2'-O-methyl modified nucleoside
  modified_base 14: mod_base = OTHER; note = 2'-O-methyl modified nucleoside
  modified_base 15: mod_base = OTHER; note = 2'-O-methyl modified nucleoside
  modified_base 16: mod_base = OTHER; note = 2'-O-methyl modified nucleoside
  modified_base 17: mod_base = OTHER; note = 2'-O-methyl modified nucleoside
  modified_base 18: mod_base = OTHER; note = 2'-O-methyl modified nucleoside
  modified_base 19: mod_base = OTHER; note = 2'-O-methyl modified nucleoside with phosphorothioate linkage
  modified_base 20: mod_base = OTHER; note = 2'-O-methyl modified nucleoside with phosphorothioate linkage
  modified_base 21: mod_base = OTHER; note = 2'-O-methyl modified nucleoside
ttccaaacatctactagaatt

SEQ ID NO: 4897 - RNA, 21 nt, synthetic construct
  source 1..21: mol_type = other RNA
  modified_base 1: mod_base = OTHER; note = 2'-O-methyl modified nucleoside
  modified_base 2: mod_base = OTHER; note = 2'-O-methyl modified nucleoside
  modified_base 3: mod_base = OTHER; note = 2'-O-methyl modified nucleoside
  modified_base 4: mod_base = OTHER; note = 2'-O-methyl modified nucleoside
  modified_base 5: mod_base = OTHER; note = 2'-O-methyl modified nucleoside
  modified_base 6: mod_base = OTHER; note = 2'-fluoro-modified nucleoside
  modified_base 7: mod_base = OTHER; note = 2'-O-methyl modified nucleoside
  modified_base 8: mod_base = OTHER; note = 2'-fluoro-modified nucleoside
  modified_base 9: mod_base = OTHER; note = 2'-fluoro-modified nucleoside
  modified_base 10: mod_base = OTHER; note = 2'-O-methyl modified nucleoside
  modified_base 11: mod_base = OTHER; note = 2'-fluoro-modified nucleoside
  modified_base 12: mod_base = OTHER; note = 2'-O-methyl modified nucleoside
  modified_base 13: mod_base = OTHER; note = 2'-O-methyl modified nucleoside
  modified_base 14: mod_base = OTHER; note = 2'-O-methyl modified nucleoside
  modified_base 15: mod_base = OTHER; note = 2'-O-methyl modified nucleoside
  modified_base 16: mod_base = OTHER; note = 2'-O-methyl modified nucleoside
  modified_base 17: mod_base = OTHER; note = 2'-O-methyl modified nucleoside
  modified_base 18: mod_base = OTHER; note = 2'-O-methyl modified nucleoside
  modified_base 19: mod_base = OTHER; note = 2'-O-methyl modified nucleoside with phosphorothioate linkage
  modified_base 20: mod_base = OTHER; note = 2'-O-methyl modified nucleoside with phosphorothioate linkage
  modified_base 21: mod_base = OTHER; note = 2'-O-methyl modified nucleoside
atagatgtcatacattcaatt

SEQ ID NO: 4898 - RNA, 21 nt, synthetic construct
  source 1..21: mol_type = other RNA
  modified_base 1: mod_base = OTHER; note = 2'-O-methyl modified nucleoside
  modified_base 2: mod_base = OTHER; note = 2'-O-methyl modified nucleoside
  modified_base 3: mod_base = OTHER; note = 2'-O-methyl modified nucleoside
  modified_base 4: mod_base = OTHER; note = 2'-O-methyl modified nucleoside
  modified_base 5: mod_base = OTHER; note = 2'-fluoro-modified nucleoside
  modified_base 6: mod_base = OTHER; note = 2'-O-methyl modified nucleoside
  modified_base 7: mod_base = OTHER; note = 2'-fluoro-modified nucleoside
  modified_base 8: mod_base = OTHER; note = 2'-O-methyl modified nucleoside
  modified_base 9: mod_base = OTHER; note = 2'-fluoro-modified nucleoside
  modified_base 10: mod_base = OTHER; note = 2'-O-methyl modified nucleoside
  modified_base 11: mod_base = OTHER; note = 2'-O-methyl modified nucleoside
  modified_base 12: mod_base = OTHER; note = 2'-O-methyl modified nucleoside
  modified_base 13: mod_base = OTHER; note = 2'-O-methyl modified nucleoside
  modified_base 14: mod_base = OTHER; note = 2'-O-methyl modified nucleoside
  modified_base 15: mod_base = OTHER; note = 2'-O-methyl modified nucleoside
  modified_base 16: mod_base = OTHER; note = 2'-O-methyl modified nucleoside
  modified_base 17: mod_base = OTHER; note = 2'-O-methyl modified nucleoside
  modified_base 18: mod_base = OTHER; note = 2'-O-methyl modified nucleoside
  modified_base 19: mod_base = OTHER; note = 2'-O-methyl modified nucleoside with phosphorothioate linkage
  modified_base 20: mod_base = OTHER; note = 2'-O-methyl modified nucleoside with phosphorothioate linkage
  modified_base 21: mod_base = OTHER; note = 2'-O-methyl modified nucleoside
tgtcatacattcatatctatt

SEQ ID NO: 4899 - DNA, 21 bp, synthetic construct
  source 1..21: mol_type = other DNA
  modified_base 1: mod_base = OTHER; note = 2'-O-methyl modified nucleoside
  modified_base 2: mod_base = OTHER; note = 2'-O-methyl modified nucleoside
  modified_base 3: mod_base = OTHER; note = 2'-O-methyl modified nucleoside
  modified_base 4: mod_base = OTHER; note = 2'-O-methyl modified nucleoside
  modified_base 5: mod_base = OTHER; note = 2'-fluoro-modified nucleoside
  modified_base 6: mod_base = OTHER; note = 2'-O-methyl modified nucleoside
  modified_base 7: mod_base = OTHER; note = 2'-fluoro-modified nucleoside
  modified_base 8: mod_base = OTHER; note = 2'-fluoro-modified nucleoside
  modified_base 10: mod_base = OTHER; note = 2'-O-methyl modified nucleoside
  modified_base 11: mod_base = OTHER; note = 2'-O-methyl modified nucleoside
  modified_base 12: mod_base = OTHER; note = 2'-O-methyl modified nucleoside
  modified_base 13: mod_base = OTHER; note = 2'-O-methyl modified nucleoside
  modified_base 14: mod_base = OTHER; note = 2'-O-methyl modified nucleoside
  modified_base 15: mod_base = OTHER; note = 2'-O-methyl modified nucleoside
  modified_base 16: mod_base = OTHER; note = 2'-O-methyl modified nucleoside
  modified_base 17: mod_base = OTHER; note = 2'-O-methyl modified nucleoside
  modified_base 18: mod_base = OTHER; note = 2'-O-methyl modified nucleoside
  modified_base 19: mod_base = OTHER; note = 2'-O-methyl modified nucleoside with phosphorothioate linkage
  modified_base 20: mod_base = OTHER; note = 2'-O-methyl modified nucleoside with phosphorothioate linkage
  modified_base 21: mod_base = OTHER; note = 2'-O-methyl modified nucleoside
  misc_feature 1..8: note = RNA
  misc_feature 9: note = DNA
  misc_feature 10..21: note = RNA
agttttcaactcattcggatt

SEQ ID NO: 4900 - DNA, 21 bp, synthetic construct
  source 1..21: mol_type = other DNA
  modified_base 1: mod_base = OTHER; note = 2'-O-methyl modified nucleoside
  modified_base 2: mod_base = OTHER; note = 2'-O-methyl modified nucleoside
  modified_base 3: mod_base = OTHER; note = 2'-O-methyl modified nucleoside
  modified_base 4: mod_base = OTHER; note = 2'-O-methyl modified nucleoside
  modified_base 5: mod_base = OTHER; note = 2'-fluoro-modified nucleoside
  modified_base 6: mod_base = OTHER; note = 2'-O-methyl modified nucleoside
  modified_base 7: mod_base = OTHER; note = 2'-fluoro-modified nucleoside
  modified_base 8: mod_base = OTHER; note = 2'-fluoro-modified nucleoside
  modified_base 10: mod_base = OTHER; note = 2'-O-methyl modified nucleoside
  modified_base 11: mod_base = OTHER; note = 2'-O-methyl modified nucleoside
  modified_base 12: mod_base = OTHER; note = 2'-O-methyl modified nucleoside
  modified_base 13: mod_base = OTHER; note = 2'-O-methyl modified nucleoside
  modified_base 14: mod_base = OTHER; note = 2'-O-methyl modified nucleoside
  modified_base 15: mod_base = OTHER; note = 2'-O-methyl modified nucleoside
  modified_base 16: mod_base = OTHER; note = 2'-O-methyl modified nucleoside
  modified_base 17: mod_base = OTHER; note = 2'-O-methyl modified nucleoside
  modified_base 18: mod_base = OTHER; note = 2'-O-methyl modified nucleoside
  modified_base 19: mod_base = OTHER; note = 2'-O-methyl modified nucleoside with phosphorothioate linkage
  modified_base 20: mod_base = OTHER; note = 2'-O-methyl modified nucleoside with phosphorothioate linkage
  modified_base 21: mod_base = OTHER; note = 2'-O-methyl modified nucleoside
  misc_feature 1..8: note = RNA
  misc_feature 9: note = DNA
  misc_feature 10..21: note = RNA
ttcaactcattcggtatcatt

SEQ ID NO: 4901 - RNA, 21 nt, synthetic construct
  source 1..21: mol_type = other RNA
  modified_base 1: mod_base = OTHER; note = 2'-O-methyl modified nucleoside
  modified_base 2: mod_base = OTHER; note = 2'-O-methyl modified nucleoside
  modified_base 3: mod_base = OTHER; note = 2'-O-methyl modified nucleoside
  modified_base 4: mod_base = OTHER; note = 2'-O-methyl modified nucleoside
  modified_base 5: mod_base = OTHER; note = 2'-fluoro-modified nucleoside
  modified_base 6: mod_base = OTHER; note = 2'-fluoro-modified nucleoside
  modified_base 7: mod_base = OTHER; note = 2'-O-methyl modified nucleoside
  modified_base 8: mod_base = OTHER; note = 2'-O-methyl modified nucleoside
  modified_base 9: mod_base = OTHER; note = 2'-fluoro-modified nucleoside
  modified_base 10: mod_base = OTHER; note = 2'-O-methyl modified nucleoside
  modified_base 11: mod_base = OTHER; note = 2'-fluoro-modified nucleoside
  modified_base 12: mod_base = OTHER; note = 2'-O-methyl modified nucleoside
  modified_base 13: mod_base = OTHER; note = 2'-O-methyl modified nucleoside
  modified_base 14: mod_base = OTHER; note = 2'-O-methyl modified nucleoside
  modified_base 15: mod_base = OTHER; note = 2'-O-methyl modified nucleoside
  modified_base 16: mod_base = OTHER; note = 2'-O-methyl modified nucleoside
  modified_base 17: mod_base = OTHER; note = 2'-O-methyl modified nucleoside
  modified_base 18: mod_base = OTHER; note = 2'-O-methyl modified nucleoside
  modified_base 19: mod_base = OTHER; note = 2'-O-methyl modified nucleoside with phosphorothioate linkage
  modified_base 20: mod_base = OTHER; note = 2'-O-methyl modified nucleoside with phosphorothioate linkage
  modified_base 21: mod_base = OTHER; note = 2'-O-methyl modified nucleoside
tcattcggtatccttatcatt

SEQ ID NO: 4902 - RNA, 21 nt, synthetic construct
  source 1..21: mol_type = other RNA
  modified_base 1: mod_base = OTHER; note = 2'-O-methyl modified nucleoside
  modified_base 2: mod_base = OTHER; note = 2'-O-methyl modified nucleoside
  modified_base 3: mod_base = OTHER; note = 2'-O-methyl modified nucleoside
  modified_base 4: mod_base = OTHER; note = 2'-O-methyl modified nucleoside
  modified_base 5: mod_base = OTHER; note = 2'-fluoro-modified nucleoside
  modified_base 6: mod_base = OTHER; note = 2'-O-methyl modified nucleoside
  modified_base 7: mod_base = OTHER; note = 2'-fluoro-modified nucleoside
  modified_base 8: mod_base = OTHER; note = 2'-fluoro-modified nucleoside
  modified_base 9: mod_base = OTHER; note = 2'-fluoro-modified nucleoside
  modified_base 10: mod_base = OTHER; note = 2'-fluoro-modified nucleoside
  modified_base 11: mod_base = OTHER; note = 2'-O-methyl modified nucleoside
  modified_base 12: mod_base = OTHER; note = 2'-O-methyl modified nucleoside
  modified_base 13: mod_base = OTHER; note = 2'-O-methyl modified nucleoside
  modified_base 14: mod_base = OTHER; note = 2'-O-methyl modified nucleoside
  modified_base 15: mod_base = OTHER; note = 2'-O-methyl modified nucleoside
  modified_base 16: mod_base = OTHER; note = 2'-O-methyl modified nucleoside
  modified_base 17: mod_base = OTHER; note = 2'-O-methyl modified nucleoside
  modified_base 18: mod_base = OTHER; note = 2'-O-methyl modified nucleoside
  modified_base 19: mod_base = OTHER; note = 2'-O-methyl modified nucleoside with phosphorothioate linkage
  modified_base 20: mod_base = OTHER; note = 2'-O-methyl modified nucleoside with phosphorothioate linkage
  modified_base 21: mod_base = OTHER; note = 2'-O-methyl modified nucleoside
tcggtatccttatcagttatt

SEQ ID NO: 4903 - RNA, 21 nt, synthetic construct
  source 1..21: mol_type = other RNA
  modified_base 1: mod_base = OTHER; note = 2'-O-methyl modified nucleoside
  modified_base 2: mod_base = OTHER; note = 2'-O-methyl modified nucleoside
  modified_base 3: mod_base = OTHER; note = 2'-O-methyl modified nucleoside
  modified_base 4: mod_base = OTHER; note = 2'-O-methyl modified nucleoside
  modified_base 5: mod_base = OTHER; note = 2'-fluoro-modified nucleoside
  modified_base 6: mod_base = OTHER; note = 2'-fluoro-modified nucleoside
  modified_base 7: mod_base = OTHER; note = 2'-O-methyl modified nucleoside
  modified_base 8: mod_base = OTHER; note = 2'-O-methyl modified nucleoside
  modified_base 9: mod_base = OTHER; note = 2'-fluoro-modified nucleoside
  modified_base 10: mod_base = OTHER; note = 2'-O-methyl modified nucleoside
  modified_base 11: mod_base = OTHER; note = 2'-fluoro-modified nucleoside
  modified_base 12: mod_base = OTHER; note = 2'-O-methyl modified nucleoside
  modified_base 13: mod_base = OTHER; note = 2'-O-methyl modified nucleoside
  modified_base 14: mod_base = OTHER; note = 2'-O-methyl modified nucleoside
  modified_base 15: mod_base = OTHER; note = 2'-O-methyl modified nucleoside
  modified_base 16: mod_base = OTHER; note = 2'-O-methyl modified nucleoside
  modified_base 17: mod_base = OTHER; note = 2'-O-methyl modified nucleoside
  modified_base 18: mod_base = OTHER; note = 2'-O-methyl modified nucleoside
  modified_base 19: mod_base = OTHER; note = 2'-O-methyl modified nucleoside with phosphorothioate linkage
  modified_base 20: mod_base = OTHER; note = 2'-O-methyl modified nucleoside with phosphorothioate linkage
  modified_base 21: mod_base = OTHER; note = 2'-O-methyl modified nucleoside
ttaatcaatgcaataagcatt

SEQ ID NO: 4904 - RNA, 21 nt, synthetic construct
  source 1..21: mol_type = other RNA
  modified_base 1: mod_base = OTHER; note = 2'-O-methyl modified nucleoside
  modified_base 2: mod_base = OTHER; note = 2'-O-methyl modified nucleoside
  modified_base 3: mod_base = OTHER; note = 2'-O-methyl modified nucleoside
  modified_base 4: mod_base = OTHER; note = 2'-O-methyl modified nucleoside
  modified_base 5: mod_base = OTHER; note = 2'-fluoro-modified nucleoside
  modified_base 6: mod_base = OTHER; note = 2'-O-methyl modified nucleoside
  modified_base 7: mod_base = OTHER; note = 2'-fluoro-modified nucleoside
  modified_base 8: mod_base = OTHER; note = 2'-O-methyl modified nucleoside
  modified_base 9: mod_base = OTHER; note = 2'-fluoro-modified nucleoside
  modified_base 10: mod_base = OTHER; note = 2'-fluoro-modified nucleoside
  modified_base 11: mod_base = OTHER; note = 2'-O-methyl modified nucleoside
  modified_base 12: mod_base = OTHER; note = 2'-O-methyl modified nucleoside
  modified_base 13: mod_base = OTHER; note = 2'-O-methyl modified nucleoside
  modified_base 14: mod_base = OTHER; note = 2'-O-methyl modified nucleoside
  modified_base 15: mod_base = OTHER; note = 2'-O-methyl modified nucleoside
  modified_base 16: mod_base = OTHER; note = 2'-O-methyl modified nucleoside
  modified_base 17: mod_base = OTHER; note = 2'-O-methyl modified nucleoside
  modified_base 18: mod_base = OTHER; note = 2'-O-methyl modified nucleoside
  modified_base 19: mod_base = OTHER; note = 2'-O-methyl modified nucleoside with phosphorothioate linkage
  modified_base 20: mod_base = OTHER; note = 2'-O-methyl modified nucleoside with phosphorothioate linkage
  modified_base 21: mod_base = OTHER; note = 2'-O-methyl modified nucleoside
atcaatgcaataagcttgatt

SEQ ID NO: 4905 - RNA, 21 nt, synthetic construct
  source 1..21: mol_type = other RNA
  modified_base 1: mod_base = OTHER; note = 2'-O-methyl modified nucleoside
  modified_base 2: mod_base = OTHER; note = 2'-O-methyl modified nucleoside
  modified_base 3: mod_base = OTHER; note = 2'-O-methyl modified nucleoside
  modified_base 4: mod_base = OTHER; note = 2'-O-methyl modified nucleoside
  modified_base 5: mod_base = OTHER; note = 2'-O-methyl modified nucleoside
  modified_base 6: mod_base = OTHER; note = 2'-fluoro-modified nucleoside
  modified_base 7: mod_base = OTHER; note = 2'-O-methyl modified nucleoside
  modified_base 8: mod_base = OTHER; note = 2'-fluoro-modified nucleoside
  modified_base 9: mod_base = OTHER; note = 2'-fluoro-modified nucleoside
  modified_base 10: mod_base = OTHER; note = 2'-O-methyl modified nucleoside
  modified_base 11: mod_base = OTHER; note = 2'-fluoro-modified nucleoside
  modified_base 12: mod_base = OTHER; note = 2'-O-methyl modified nucleoside
  modified_base 13: mod_base = OTHER; note = 2'-O-methyl modified nucleoside
  modified_base 14: mod_base = OTHER; note = 2'-O-methyl modified nucleoside
  modified_base 15: mod_base = OTHER; note = 2'-O-methyl modified nucleoside
  modified_base 16: mod_base = OTHER; note = 2'-O-methyl modified nucleoside
  modified_base 17: mod_base = OTHER; note = 2'-O-methyl modified nucleoside
  modified_base 18: mod_base = OTHER; note = 2'-O-methyl modified nucleoside
  modified_base 19: mod_base = OTHER; note = 2'-O-methyl modified nucleoside with phosphorothioate linkage
  modified_base 20: mod_base = OTHER; note = 2'-O-methyl modified nucleoside with phosphorothioate linkage
  modified_base 21: mod_base = OTHER; note = 2'-O-methyl modified nucleoside
tcaatgcaataagcttgaatt

SEQ ID NO: 4906 - RNA, 21 nt, synthetic construct
  source 1..21: mol_type = other RNA
  modified_base 1: mod_base = OTHER; note = 2'-O-methyl modified nucleoside
  modified_base 2: mod_base = OTHER; note = 2'-O-methyl modified nucleoside
  modified_base 3: mod_base = OTHER; note = 2'-O-methyl modified nucleoside
  modified_base 4: mod_base = OTHER; note = 2'-O-methyl modified nucleoside
  modified_base 5: mod_base = OTHER; note = 2'-O-methyl modified nucleoside
  modified_base 6: mod_base = OTHER; note = 2'-fluoro-modified nucleoside
  modified_base 7: mod_base = OTHER; note = 2'-fluoro-modified nucleoside
  modified_base 8: mod_base = OTHER; note = 2'-O-methyl modified nucleoside
  modified_base 9: mod_base = OTHER; note = 2'-fluoro-modified nucleoside
  modified_base 10: mod_base = OTHER; note = 2'-fluoro-modified nucleoside
  modified_base 11: mod_base = OTHER; note = 2'-O-methyl modified nucleoside
  modified_base 12: mod_base = OTHER; note = 2'-O-methyl modified nucleoside
  modified_base 13: mod_base = OTHER; note = 2'-O-methyl modified nucleoside
  modified_base 14: mod_base = OTHER; note = 2'-O-methyl modified nucleoside
  modified_base 15: mod_base = OTHER; note = 2'-O-methyl modified nucleoside
  modified_base 16: mod_base = OTHER; note = 2'-O-methyl modified nucleoside
  modified_base 17: mod_base = OTHER; note = 2'-O-methyl modified nucleoside
  modified_base 18: mod_base = OTHER; note = 2'-O-methyl modified nucleoside
  modified_base 19: mod_base = OTHER; note = 2'-O-methyl modified nucleoside with phosphorothioate linkage
  modified_base 20: mod_base = OTHER; note = 2'-O-methyl modified nucleoside with phosphorothioate linkage
  modified_base 21: mod_base = OTHER; note = 2'-O-methyl modified nucleoside
aatgcaataagcttgacgatt

SEQ ID NO: 4907 - RNA, 21 nt, synthetic construct
  source 1..21: mol_type = other RNA
  modified_base 1: mod_base = OTHER; note = 2'-O-methyl modified nucleoside
  modified_base 2: mod_base = OTHER; note = 2'-O-methyl modified nucleoside
  modified_base 3: mod_base = OTHER; note = 2'-O-methyl modified nucleoside
  modified_base 4: mod_base = OTHER; note = 2'-O-methyl modified nucleoside
  modified_base 5: mod_base = OTHER; note = 2'-O-methyl modified nucleoside
  modified_base 6: mod_base = OTHER; note = 2'-fluoro-modified nucleoside
  modified_base 7: mod_base = OTHER; note = 2'-fluoro-modified nucleoside
  modified_base 8: mod_base = OTHER; note = 2'-fluoro-modified nucleoside
  modified_base 9: mod_base = OTHER; note = 2'-fluoro-modified nucleoside
  modified_base 10: mod_base = OTHER; note = 2'-O-methyl modified nucleoside
  modified_base 11: mod_base = OTHER; note = 2'-fluoro-modified nucleoside
  modified_base 12: mod_base = OTHER; note = 2'-O-methyl modified nucleoside
  modified_base 13: mod_base = OTHER; note = 2'-O-methyl modified nucleoside
  modified_base 14: mod_base = OTHER; note = 2'-O-methyl modified nucleoside
  modified_base 15: mod_base = OTHER; note = 2'-O-methyl modified nucleoside
  modified_base 16: mod_base = OTHER; note = 2'-O-methyl modified nucleoside
  modified_base 17: mod_base = OTHER; note = 2'-O-methyl modified nucleoside
  modified_base 18: mod_base = OTHER; note = 2'-O-methyl modified nucleoside
  modified_base 19: mod_base = OTHER; note = 2'-O-methyl modified nucleoside with phosphorothioate linkage
  modified_base 20: mod_base = OTHER; note = 2'-O-methyl modified nucleoside with phosphorothioate linkage
  modified_base 21: mod_base = OTHER; note = 2'-O-methyl modified nucleoside
attcattccgttaccattatt

SEQ ID NO: 4908 - RNA, 21 nt, synthetic construct
  source 1..21: mol_type = other RNA
  modified_base 1: mod_base = OTHER; note = 2'-O-methyl modified nucleoside
  modified_base 2: mod_base = OTHER; note = 2'-O-methyl modified nucleoside
  modified_base 3: mod_base = OTHER; note = 2'-O-methyl modified nucleoside
  modified_base 4: mod_base = OTHER; note = 2'-O-methyl modified nucleoside
  modified_base 5: mod_base = OTHER; note = 2'-O-methyl modified nucleoside
  modified_base 6: mod_base = OTHER; note = 2'-O-methyl modified nucleoside
  modified_base 7: mod_base = OTHER; note = 2'-fluoro-modified nucleoside
  modified_base 8: mod_base = OTHER; note = 2'-O-methyl modified nucleoside
  modified_base 9: mod_base = OTHER; note = 2'-fluoro-modified nucleoside
  modified_base 10: mod_base = OTHER; note = 2'-fluoro-modified nucleoside
  modified_base 11: mod_base = OTHER; note = 2'-O-methyl modified nucleoside
  modified_base 12: mod_base = OTHER; note = 2'-O-methyl modified nucleoside
  modified_base 13: mod_base = OTHER; note = 2'-O-methyl modified nucleoside
  modified_base 14: mod_base = OTHER; note = 2'-O-methyl modified nucleoside
  modified_base 15: mod_base = OTHER; note = 2'-O-methyl modified nucleoside
  modified_base 16: mod_base = OTHER; note = 2'-O-methyl modified nucleoside
  modified_base 17: mod_base = OTHER; note = 2'-O-methyl modified nucleoside
  modified_base 18: mod_base = OTHER; note = 2'-O-methyl modified nucleoside
  modified_base 19: mod_base = OTHER; note = 2'-O-methyl modified nucleoside with phosphorothioate linkage
  modified_base 20: mod_base = OTHER; note = 2'-O-methyl modified nucleoside with phosphorothioate linkage
  modified_base 21: mod_base = OTHER; note = 2'-O-methyl modified nucleoside
attactgtaaccacgatcatt

SEQ ID NO: 4909 - RNA, 21 nt, synthetic construct
  source 1..21: mol_type = other RNA
  modified_base 1: mod_base = OTHER; note = 2'-O-methyl modified nucleoside
  modified_base 2: mod_base = OTHER; note = 2'-O-methyl modified nucleoside
  modified_base 3: mod_base = OTHER; note = 2'-O-methyl modified nucleoside
  modified_base 4: mod_base = OTHER; note = 2'-O-methyl modified nucleoside
  modified_base 5: mod_base = OTHER; note = 2'-O-methyl modified nucleoside
  modified_base 6: mod_base = OTHER; note = 2'-fluoro-modified nucleoside
  modified_base 7: mod_base = OTHER; note = 2'-fluoro-modified nucleoside
  modified_base 8: mod_base = OTHER; note = 2'-O-methyl modified nucleoside
  modified_base 9: mod_base = OTHER; note = 2'-fluoro-modified nucleoside
  modified_base 10: mod_base = OTHER; note = 2'-fluoro-modified nucleoside
  modified_base 11: mod_base = OTHER; note = 2'-O-methyl modified nucleoside
  modified_base 12: mod_base = OTHER; note = 2'-O-methyl modified nucleoside
  modified_base 13: mod_base = OTHER; note = 2'-O-methyl modified nucleoside
  modified_base 14: mod_base = OTHER; note = 2'-O-methyl modified nucleoside
  modified_base 15: mod_base = OTHER; note = 2'-O-methyl modified nucleoside
  modified_base 16: mod_base = OTHER; note = 2'-O-methyl modified nucleoside
  modified_base 17: mod_base = OTHER; note = 2'-O-methyl modified nucleoside
  modified_base 18: mod_base = OTHER; note = 2'-O-methyl modified nucleoside
  modified_base 19: mod_base = OTHER; note = 2'-O-methyl modified nucleoside with phosphorothioate linkage
  modified_base 20: mod_base = OTHER; note = 2'-O-methyl modified nucleoside with phosphorothioate linkage
  modified_base 21: mod_base = OTHER; note = 2'-O-methyl modified nucleoside
atcagttgtcaagtaattatt

SEQ ID NO: 4910 - RNA, 21 nt, synthetic construct
  source 1..21: mol_type = other RNA
  modified_base 1: mod_base = OTHER; note = 2'-O-methyl modified nucleoside
  modified_base 2: mod_base = OTHER; note = 2'-O-methyl modified nucleoside
  modified_base 3: mod_base = OTHER; note = 2'-O-methyl modified nucleoside
  modified_base 4: mod_base = OTHER; note = 2'-O-methyl modified nucleoside
  modified_base 5: mod_base = OTHER; note = 2'-fluoro-modified nucleoside
  modified_base 6: mod_base = OTHER; note = 2'-fluoro-modified nucleoside
  modified_base 7: mod_base = OTHER; note = 2'-O-methyl modified nucleoside
  modified_base 8: mod_base = OTHER; note = 2'-O-methyl modified nucleoside
  modified_base 9: mod_base = OTHER; note = 2'-fluoro-modified nucleoside
  modified_base 10: mod_base = OTHER; note = 2'-fluoro-modified nucleoside
  modified_base 11: mod_base = OTHER; note = 2'-O-methyl modified nucleoside
  modified_base 12: mod_base = OTHER; note = 2'-O-methyl modified nucleoside
  modified_base 13: mod_base = OTHER; note = 2'-O-methyl modified nucleoside
  modified_base 14: mod_base = OTHER; note = 2'-O-methyl modified nucleoside
  modified_base 15: mod_base = OTHER; note = 2'-O-methyl modified nucleoside
  modified_base 16: mod_base = OTHER; note = 2'-O-methyl modified nucleoside
  modified_base 17: mod_base = OTHER; note = 2'-O-methyl modified nucleoside
  modified_base 18: mod_base = OTHER; note = 2'-O-methyl modified nucleoside
  modified_base 19: mod_base = OTHER; note = 2'-O-methyl modified nucleoside with phosphorothioate linkage
  modified_base 20: mod_base = OTHER; note = 2'-O-methyl modified nucleoside with phosphorothioate linkage
  modified_base 21: mod_base = OTHER; note = 2'-O-methyl modified nucleoside
tgtcaagtaattgttacaatt

SEQ ID NO: 4911 - RNA, 21 nt, synthetic construct
  source 1..21: mol_type = other RNA
  modified_base 1: mod_base = OTHER; note = 2'-O-methyl modified nucleoside
  modified_base 2: mod_base = OTHER; note = 2'-O-methyl modified nucleoside
  modified_base 3: mod_base = OTHER; note = 2'-O-methyl modified nucleoside
  modified_base 4: mod_base = OTHER; note = 2'-O-methyl modified nucleoside
  modified_base 5: mod_base = OTHER; note = 2'-fluoro-modified nucleoside
  modified_base 6: mod_base = OTHER; note = 2'-O-methyl modified nucleoside
  modified_base 7: mod_base = OTHER; note = 2'-fluoro-modified nucleoside
  modified_base 8: mod_base = OTHER; note = 2'-O-methyl modified nucleoside
  modified_base 9: mod_base = OTHER; note = 2'-fluoro-modified nucleoside
  modified_base 10: mod_base = OTHER; note = 2'-fluoro-modified nucleoside
  modified_base 11: mod_base = OTHER; note = 2'-O-methyl modified nucleoside
  modified_base 12: mod_base = OTHER; note = 2'-O-methyl modified nucleoside
  modified_base 13: mod_base = OTHER; note = 2'-O-methyl modified nucleoside
  modified_base 14: mod_base = OTHER; note = 2'-O-methyl modified nucleoside
  modified_base 15: mod_base = OTHER; note = 2'-O-methyl modified nucleoside
  modified_base 16: mod_base = OTHER; note = 2'-O-methyl modified nucleoside
  modified_base 17: mod_base = OTHER; note = 2'-O-methyl modified nucleoside
  modified_base 18: mod_base = OTHER; note = 2'-O-methyl modified nucleoside
  modified_base 19: mod_base = OTHER; note = 2'-O-methyl modified nucleoside with phosphorothioate linkage
  modified_base 20: mod_base = OTHER; note = 2'-O-methyl modified nucleoside with phosphorothioate linkage
  modified_base 21: mod_base = OTHER; note = 2'-O-methyl modified nucleoside
tgttacatgactatgtccatt

SEQ ID NO: 4912 - RNA, 21 nt, synthetic construct
  source 1..21: mol_type = other RNA
  modified_base 1: mod_base = OTHER; note = 2'-O-methyl modified nucleoside
  modified_base 2: mod_base = OTHER; note = 2'-O-methyl modified nucleoside
  modified_base 3: mod_base = OTHER; note = 2'-O-methyl modified nucleoside
  modified_base 4: mod_base = OTHER; note = 2'-O-methyl modified nucleoside
  modified_base 5: mod_base = OTHER; note = 2'-fluoro-modified nucleoside
  modified_base 6: mod_base = OTHER; note = 2'-O-methyl modified nucleoside
  modified_base 7: mod_base = OTHER; note = 2'-O-methyl modified nucleoside
  modified_base 8: mod_base = OTHER; note = 2'-fluoro-modified nucleoside
  modified_base 9: mod_base = OTHER; note = 2'-fluoro-modified nucleoside
  modified_base 10: mod_base = OTHER; note = 2'-O-methyl modified nucleoside
  modified_base 11: mod_base = OTHER; note = 2'-fluoro-modified nucleoside
  modified_base 12: mod_base = OTHER; note = 2'-O-methyl modified nucleoside
  modified_base 13: mod_base = OTHER; note = 2'-O-methyl modified nucleoside
  modified_base 14: mod_base = OTHER; note = 2'-O-methyl modified nucleoside
  modified_base 15: mod_base = OTHER; note = 2'-O-methyl modified nucleoside
  modified_base 16: mod_base = OTHER; note = 2'-O-methyl modified nucleoside
  modified_base 17: mod_base = OTHER; note = 2'-O-methyl modified nucleoside
  modified_base 18: mod_base = OTHER; note = 2'-O-methyl modified nucleoside
  modified_base 19: mod_base = OTHER; note = 2'-O-methyl modified nucleoside with phosphorothioate linkage
  modified_base 20: mod_base = OTHER; note = 2'-O-methyl modified nucleoside with phosphorothioate linkage
  modified_base 21: mod_base = OTHER; note = 2'-O-methyl modified nucleoside
tacatgactatgtccattatt

SEQ ID NO: 4913 - RNA, 21 nt, synthetic construct
  source 1..21: mol_type = other RNA
  modified_base 1: mod_base = OTHER; note = 2'-O-methyl modified nucleoside
  modified_base 2: mod_base = OTHER; note = 2'-O-methyl modified nucleoside
  modified_base 3: mod_base = OTHER; note = 2'-O-methyl modified nucleoside
  modified_base 4: mod_base = OTHER; note = 2'-O-methyl modified nucleoside
  modified_base 5: mod_base = OTHER; note = 2'-fluoro-modified nucleoside
  modified_base 6: mod_base = OTHER; note = 2'-fluoro-modified nucleoside
  modified_base 7: mod_base = OTHER; note = 2'-O-methyl modified nucleoside
  modified_base 8: mod_base = OTHER; note = 2'-O-methyl modified nucleoside
  modified_base 9: mod_base = OTHER; note = 2'-fluoro-modified nucleoside
  modified_base 10: mod_base = OTHER; note = 2'-O-methyl modified nucleoside
  modified_base 11: mod_base = OTHER; note = 2'-O-methyl modified nucleoside
  modified_base 12: mod_base = OTHER; note = 2'-O-methyl modified nucleoside
  modified_base 13: mod_base = OTHER; note = 2'-O-methyl modified nucleoside
  modified_base 14: mod_base = OTHER; note = 2'-O-methyl modified nucleoside
  modified_base 15: mod_base = OTHER; note = 2'-O-methyl modified nucleoside
  modified_base 16: mod_base = OTHER; note = 2'-O-methyl modified nucleoside
  modified_base 17: mod_base = OTHER; note = 2'-O-methyl modified nucleoside
  modified_base 18: mod_base = OTHER; note = 2'-O-methyl modified nucleoside
  modified_base 19: mod_base = OTHER; note = 2'-O-methyl modified nucleoside with phosphorothioate linkage
  modified_base 20: mod_base = OTHER; note = 2'-O-methyl modified nucleoside with phosphorothioate linkage
  modified_base 21: mod_base = OTHER; note = 2'-O-methyl modified nucleoside
cattttaatgggtacggaatt

SEQ ID NO: 4914 - DNA, 21 bp, synthetic construct
  source 1..21: mol_type = other DNA
  modified_base 1: mod_base = OTHER; note = 2'-O-methyl modified nucleoside
  modified_base 2: mod_base = OTHER; note = 2'-O-methyl modified nucleoside
  modified_base 3: mod_base = OTHER; note = 2'-O-methyl modified nucleoside
  modified_base 4: mod_base = OTHER; note = 2'-O-methyl modified nucleoside
  modified_base 5: mod_base = OTHER; note = 2'-fluoro-modified nucleoside
  modified_base 6: mod_base = OTHER; note = 2'-O-methyl modified nucleoside
  modified_base 7: mod_base = OTHER; note = 2'-fluoro-modified nucleoside
  modified_base 8: mod_base = OTHER; note = 2'-fluoro-modified nucleoside
  modified_base 10: mod_base = OTHER; note = 2'-O-methyl modified nucleoside
  modified_base 11: mod_base = OTHER; note = 2'-O-methyl modified nucleoside
  modified_base 12: mod_base = OTHER; note = 2'-O-methyl modified nucleoside
  modified_base 13: mod_base = OTHER; note = 2'-O-methyl modified nucleoside
  modified_base 14: mod_base = OTHER; note = 2'-O-methyl modified nucleoside
  modified_base 15: mod_base = OTHER; note = 2'-O-methyl modified nucleoside
  modified_base 16: mod_base = OTHER; note = 2'-O-methyl modified nucleoside
  modified_base 17: mod_base = OTHER; note = 2'-O-methyl modified nucleoside
  modified_base 18: mod_base = OTHER; note = 2'-O-methyl modified nucleoside
  modified_base 19: mod_base = OTHER; note = 2'-O-methyl modified nucleoside with phosphorothioate linkage
  modified_base 20: mod_base = OTHER; note = 2'-O-methyl modified nucleoside with phosphorothioate linkage
  modified_base 21: mod_base = OTHER; note = 2'-O-methyl modified nucleoside
  misc_feature 1..8: note = RNA
  misc_feature 9: note = DNA
  misc_feature 10..21: note = RNA
aagtatttatcgagtgctatt

SEQ ID NO: 4915 - RNA, 21 nt, synthetic construct
  source 1..21: mol_type = other RNA
  modified_base 1: mod_base = OTHER; note = 2'-O-methyl modified nucleoside
  modified_base 2: mod_base = OTHER; note = 2'-O-methyl modified nucleoside
  modified_base 3: mod_base = OTHER; note = 2'-O-methyl modified nucleoside
  modified_base 4: mod_base = OTHER; note = 2'-O-methyl modified nucleoside
  modified_base 5: mod_base = OTHER; note = 2'-O-methyl modified nucleoside
  modified_base 6: mod_base = OTHER; note = 2'-O-methyl modified nucleoside
  modified_base 7: mod_base = OTHER; note = 2'-fluoro-modified nucleoside
  modified_base 8: mod_base = OTHER; note = 2'-O-methyl modified nucleoside
  modified_base 9: mod_base = OTHER; note = 2'-fluoro-modified nucleoside
  modified_base 10: mod_base = OTHER; note = 2'-O-methyl modified nucleoside
  modified_base 11: mod_base = OTHER; note = 2'-fluoro-modified nucleoside
  modified_base 12: mod_base = OTHER; note = 2'-O-methyl modified nucleoside
  modified_base 13: mod_base = OTHER; note = 2'-O-methyl modified nucleoside
  modified_base 14: mod_base = OTHER; note = 2'-O-methyl modified nucleoside
  modified_base 15: mod_base = OTHER; note = 2'-O-methyl modified nucleoside
  modified_base 16: mod_base = OTHER; note = 2'-O-methyl modified nucleoside
  modified_base 17: mod_base = OTHER; note = 2'-O-methyl modified nucleoside
  modified_base 18: mod_base = OTHER; note = 2'-O-methyl modified nucleoside
  modified_base 19: mod_base = OTHER; note = 2'-O-methyl modified nucleoside with phosphorothioate linkage
  modified_base 20: mod_base = OTHER; note = 2'-O-methyl modified nucleoside with phosphorothioate linkage
  modified_base 21: mod_base = OTHER; note = 2'-O-methyl modified nucleoside
tttatcgagtgctcaatgatt

SEQ ID NO: 4916 - RNA, 21 nt, synthetic construct
  source 1..21: mol_type = other RNA
  modified_base 1: mod_base = OTHER; note = 2'-O-methyl modified nucleoside with phosphorothioate linkage
  modified_base 2: mod_base = OTHER; note = 2'-fluoro-modified nucleoside with phosphorothioate linkage
  modified_base 3: mod_base = OTHER; note = 2'-O-methyl modified nucleoside
  modified_base 4: mod_base = OTHER; note = 2'-fluoro-modified nucleoside
  modified_base 5: mod_base = OTHER; note = 2'-O-methyl modified nucleoside
  modified_base 6: mod_base = OTHER; note = 2'-fluoro-modified nucleoside
  modified_base 7: mod_base = OTHER; note = 2'-O-methyl modified nucleoside
  modified_base 8: mod_base = OTHER; note = 2'-fluoro-modified nucleoside
  modified_base 9: mod_base = OTHER; note = 2'-O-methyl modified nucleoside
  modified_base 10: mod_base = OTHER; note = 2'-fluoro-modified nucleoside
  modified_base 11: mod_base = OTHER; note = 2'-O-methyl modified nucleoside
  modified_base 12: mod_base = OTHER; note = 2'-fluoro-modified nucleoside
  modified_base 13: mod_base = OTHER; note = 2'-O-methyl modified nucleoside
  modified_base 14: mod_base = OTHER; note = 2'-fluoro-modified nucleoside
  modified_base 15: mod_base = OTHER; note = 2'-O-methyl modified nucleoside
  modified_base 16: mod_base = OTHER; note = 2'-fluoro-modified nucleoside
  modified_base 17: mod_base = OTHER; note = 2'-O-methyl modified nucleoside
  modified_base 18: mod_base = OTHER; note = 2'-fluoro-modified nucleoside
  modified_base 19: mod_base = OTHER; note = 2'-O-methyl modified nucleoside with phosphorothioate linkage
  modified_base 20: mod_base = OTHER; note = 2'-O-methyl modified nucleoside with phosphorothioate linkage
  modified_base 21: mod_base = OTHER; note = 2'-O-methyl modified nucleoside
taaaggatgtgttgagaactt

SEQ ID NO: 4917 - RNA, 21 nt, synthetic construct
  source 1..21: mol_type = other RNA
  modified_base 1: mod_base = OTHER; note = 2'-O-methyl modified nucleoside with phosphorothioate linkage
  modified_base 2: mod_base = OTHER; note = 2'-fluoro-modified nucleoside with phosphorothioate linkage
  modified_base 3: mod_base = OTHER; note = 2'-O-methyl modified nucleoside
  modified_base 4: mod_base = OTHER; note = 2'-fluoro-modified nucleoside
  modified_base 5: mod_base = OTHER; note = 2'-O-methyl modified nucleoside
  modified_base 6: mod_base = OTHER; note = 2'-fluoro-modified nucleoside
  modified_base 7: mod_base = OTHER; note = 2'-O-methyl modified nucleoside
  modified_base 8: mod_base = OTHER; note = 2'-fluoro-modified nucleoside
  modified_base 9: mod_base = OTHER; note = 2'-O-methyl modified nucleoside
  modified_base 10: mod_base = OTHER; note = 2'-fluoro-modified nucleoside
  modified_base 11: mod_base = OTHER; note = 2'-O-methyl modified nucleoside
  modified_base 12: mod_base = OTHER; note = 2'-fluoro-modified nucleoside
  modified_base 13: mod_base = OTHER; note = 2'-O-methyl modified nucleoside
  modified_base 14: mod_base = OTHER; note = 2'-fluoro-modified nucleoside
  modified_base 15: mod_base = OTHER; note = 2'-O-methyl modified nucleoside
  modified_base 16: mod_base = OTHER; note = 2'-fluoro-modified nucleoside
  modified_base 17: mod_base = OTHER; note = 2'-O-methyl modified nucleoside
  modified_base 18: mod_base = OTHER; note = 2'-fluoro-modified nucleoside
  modified_base 19: mod_base = OTHER; note = 2'-O-methyl modified nucleoside with phosphorothioate linkage
  modified_base 20: mod_base = OTHER; note = 2'-O-methyl modified nucleoside with phosphorothioate linkage
  modified_base 21: mod_base = OTHER; note = 2'-O-methyl modified nucleoside
ttctagtagatgtttggaatt

SEQ ID NO: 4918 - RNA, 21 nt, synthetic construct
  source 1..21: mol_type = other RNA
  modified_base 1: mod_base = OTHER; note = 2'-O-methyl modified nucleoside with phosphorothioate linkage
  modified_base 2: mod_base = OTHER; note = 2'-fluoro-modified nucleoside with phosphorothioate linkage
  modified_base 3: mod_base = OTHER; note = 2'-O-methyl modified nucleoside
  modified_base 4: mod_base = OTHER; note = 2'-fluoro-modified nucleoside
  modified_base 5: mod_base = OTHER; note = 2'-O-methyl modified nucleoside
  modified_base 6: mod_base = OTHER; note = 2'-fluoro-modified nucleoside
  modified_base 7: mod_base = OTHER; note = 2'-O-methyl modified nucleoside
  modified_base 8: mod_base = OTHER; note = 2'-fluoro-modified nucleoside
  modified_base 9: mod_base = OTHER; note = 2'-O-methyl modified nucleoside
  modified_base 10: mod_base = OTHER; note = 2'-fluoro-modified nucleoside
  modified_base 11: mod_base = OTHER; note = 2'-O-methyl modified nucleoside
  modified_base 12: mod_base = OTHER; note = 2'-fluoro-modified nucleoside
  modified_base 13: mod_base = OTHER; note = 2'-O-methyl modified nucleoside
  modified_base 14: mod_base = OTHER; note = 2'-fluoro-modified nucleoside
  modified_base 15: mod_base = OTHER; note = 2'-O-methyl modified nucleoside
  modified_base 16: mod_base = OTHER; note = 2'-fluoro-modified nucleoside
  modified_base 17: mod_base = OTHER; note = 2'-O-methyl modified nucleoside
  modified_base 18: mod_base = OTHER; note = 2'-fluoro-modified nucleoside
  modified_base 19: mod_base = OTHER; note = 2'-O-methyl modified nucleoside with phosphorothioate linkage
  modified_base 20: mod_base = OTHER; note = 2'-O-methyl modified nucleoside with phosphorothioate linkage
  modified_base 21: mod_base = OTHER; note = 2'-O-methyl modified nucleoside
ttgaatgtatgacatctattt

SEQ ID NO: 4919 - RNA, 21 nt, synthetic construct
  source 1..21: mol_type = other RNA
  modified_base 1: mod_base = OTHER; note = 2'-O-methyl modified nucleoside with phosphorothioate linkage
  modified_base 2: mod_base = OTHER; note = 2'-fluoro-modified nucleoside with phosphorothioate linkage
  modified_base 3: mod_base = OTHER; note = 2'-O-methyl modified nucleoside
  modified_base 4: mod_base = OTHER; note = 2'-fluoro-modified nucleoside
  modified_base 5: mod_base = OTHER; note = 2'-O-methyl modified nucleoside
  modified_base 6: mod_base = OTHER; note = 2'-fluoro-modified nucleoside
  modified_base 7: mod_base = OTHER; note = 2'-O-methyl modified nucleoside
  modified_base 8: mod_base = OTHER; note = 2'-fluoro-modified nucleoside
  modified_base 9: mod_base = OTHER; note = 2'-O-methyl modified nucleoside
  modified_base 10: mod_base = OTHER; note = 2'-fluoro-modified nucleoside
  modified_base 11: mod_base = OTHER; note = 2'-O-methyl modified nucleoside
  modified_base 12: mod_base = OTHER; note = 2'-fluoro-modified nucleoside
  modified_base 13: mod_base = OTHER; note = 2'-O-methyl modified nucleoside
  modified_base 14: mod_base = OTHER; note = 2'-fluoro-modified nucleoside
  modified_base 15: mod_base = OTHER; note = 2'-O-methyl modified nucleoside
  modified_base 16: mod_base = OTHER; note = 2'-fluoro-modified nucleoside
  modified_base 17: mod_base = OTHER; note = 2'-O-methyl modified nucleoside
  modified_base 18: mod_base = OTHER; note = 2'-fluoro-modified nucleoside
  modified_base 19: mod_base = OTHER; note = 2'-O-methyl modified nucleoside with phosphorothioate linkage
  modified_base 20: mod_base = OTHER; note = 2'-O-methyl modified nucleoside with phosphorothioate linkage
  modified_base 21: mod_base = OTHER; note = 2'-O-methyl modified nucleoside
tagatatgaatgtatgacatt

SEQ ID NO: 4920 - RNA, 21 nt, synthetic construct
  source 1..21: mol_type = other RNA
  modified_base 1: mod_base = OTHER; note = 2'-O-methyl modified nucleoside with phosphorothioate linkage
  modified_base 2: mod_base = OTHER; note = 2'-fluoro-modified nucleoside with phosphorothioate linkage
  modified_base 3: mod_base = OTHER; note = 2'-O-methyl modified nucleoside
  modified_base 4: mod_base = OTHER; note = 2'-fluoro-modified nucleoside
  modified_base 5: mod_base = OTHER; note = 2'-O-methyl modified nucleoside
  modified_base 6: mod_base = OTHER; note = 2'-fluoro-modified nucleoside
  modified_base 7: mod_base = OTHER; note = 2'-O-methyl modified nucleoside
  modified_base 8: mod_base = OTHER; note = 2'-fluoro-modified nucleoside
  modified_base 9: mod_base = OTHER; note = 2'-O-methyl modified nucleoside
  modified_base 10: mod_base = OTHER; note = 2'-fluoro-modified nucleoside
  modified_base 11: mod_base = OTHER; note = 2'-O-methyl modified nucleoside
  modified_base 12: mod_base = OTHER; note = 2'-fluoro-modified nucleoside
  modified_base 13: mod_base = OTHER; note = 2'-O-methyl modified nucleoside
  modified_base 14: mod_base = OTHER; note = 2'-fluoro-modified nucleoside
  modified_base 15: mod_base = OTHER; note = 2'-O-methyl modified nucleoside
  modified_base 16: mod_base = OTHER; note = 2'-fluoro-modified nucleoside
  modified_base 17: mod_base = OTHER; note = 2'-O-methyl modified nucleoside
  modified_base 18: mod_base = OTHER; note = 2'-fluoro-modified nucleoside
  modified_base 19: mod_base = OTHER; note = 2'-O-methyl modified nucleoside with phosphorothioate linkage
  modified_base 20: mod_base = OTHER; note = 2'-O-methyl modified nucleoside with phosphorothioate linkage
  modified_base 21: mod_base = OTHER; note = 2'-O-methyl modified nucleoside
tccgaatgagttgaaaacttt

SEQ ID NO: 4921 - RNA, 21 nt, synthetic construct
  source 1..21: mol_type = other RNA
  modified_base 1: mod_base = OTHER; note = 2'-O-methyl modified nucleoside with phosphorothioate linkage
  modified_base 2: mod_base = OTHER; note = 2'-fluoro-modified nucleoside with phosphorothioate linkage
  modified_base 3: mod_base = OTHER; note = 2'-O-methyl modified nucleoside
  modified_base 4: mod_base = OTHER; note = 2'-fluoro-modified nucleoside
  modified_base 5: mod_base = OTHER; note = 2'-O-methyl modified nucleoside
  modified_base 6: mod_base = OTHER; note = 2'-fluoro-modified nucleoside
  modified_base 7: mod_base = OTHER; note = 2'-O-methyl modified nucleoside
  modified_base 8: mod_base = OTHER; note = 2'-fluoro-modified nucleoside
  modified_base 9: mod_base = OTHER; note = 2'-O-methyl modified nucleoside
  modified_base 10: mod_base = OTHER; note = 2'-fluoro-modified nucleoside
  modified_base 11: mod_base = OTHER; note = 2'-O-methyl modified nucleoside
  modified_base 12: mod_base = OTHER; note = 2'-fluoro-modified nucleoside
  modified_base 13: mod_base = OTHER; note = 2'-O-methyl modified nucleoside
  modified_base 14: mod_base = OTHER; note = 2'-fluoro-modified nucleoside
  modified_base 15: mod_base = OTHER; note = 2'-O-methyl modified nucleoside
  modified_base 16: mod_base = OTHER; note = 2'-fluoro-modified nucleoside
  modified_base 17: mod_base = OTHER; note = 2'-O-methyl modified nucleoside
  modified_base 18: mod_base = OTHER; note = 2'-fluoro-modified nucleoside
  modified_base 19: mod_base = OTHER; note = 2'-O-methyl modified nucleoside with phosphorothioate linkage
  modified_base 20: mod_base = OTHER; note = 2'-O-methyl modified nucleoside with phosphorothioate linkage
  modified_base 21: mod_base = OTHER; note = 2'-O-methyl modified nucleoside
tgataccgaatgagttgaatt

SEQ ID NO: 4922 - RNA, 21 nt, synthetic construct
  source 1..21: mol_type = other RNA
  modified_base 1: mod_base = OTHER; note = 2'-O-methyl modified nucleoside with phosphorothioate linkage
  modified_base 2: mod_base = OTHER; note = 2'-fluoro-modified nucleoside with phosphorothioate linkage
  modified_base 3: mod_base = OTHER; note = 2'-O-methyl modified nucleoside
  modified_base 4: mod_base = OTHER; note = 2'-fluoro-modified nucleoside
  modified_base 5: mod_base = OTHER; note = 2'-O-methyl modified nucleoside
  modified_base 6: mod_base = OTHER; note = 2'-fluoro-modified nucleoside
  modified_base 7: mod_base = OTHER; note = 2'-O-methyl modified nucleoside
  modified_base 8: mod_base = OTHER; note = 2'-fluoro-modified nucleoside
  modified_base 9: mod_base = OTHER; note = 2'-O-methyl modified nucleoside
  modified_base 10: mod_base = OTHER; note = 2'-fluoro-modified nucleoside
  modified_base 11: mod_base = OTHER; note = 2'-O-methyl modified nucleoside
  modified_base 12: mod_base = OTHER; note = 2'-fluoro-modified nucleoside
  modified_base 13: mod_base = OTHER; note = 2'-O-methyl modified nucleoside
  modified_base 14: mod_base = OTHER; note = 2'-fluoro-modified nucleoside
  modified_base 15: mod_base = OTHER; note = 2'-O-methyl modified nucleoside
  modified_base 16: mod_base = OTHER; note = 2'-fluoro-modified nucleoside
  modified_base 17: mod_base = OTHER; note = 2'-O-methyl modified nucleoside
  modified_base 18: mod_base = OTHER; note = 2'-fluoro-modified nucleoside
  modified_base 19: mod_base = OTHER; note = 2'-O-methyl modified nucleoside with phosphorothioate linkage
  modified_base 20: mod_base = OTHER; note = 2'-O-methyl modified nucleoside with phosphorothioate linkage
  modified_base 21: mod_base = OTHER; note = 2'-O-methyl modified nucleoside
tgataaggataccgaatgatt

SEQ ID NO: 4923 - RNA, 21 nt, synthetic construct
  source 1..21: mol_type = other RNA
  modified_base 1: mod_base = OTHER; note = 2'-O-methyl modified nucleoside with phosphorothioate linkage
  modified_base 2: mod_base = OTHER; note = 2'-fluoro-modified nucleoside with phosphorothioate linkage
  modified_base 3: mod_base = OTHER; note = 2'-O-methyl modified nucleoside
  modified_base 4: mod_base = OTHER; note = 2'-fluoro-modified nucleoside
  modified_base 5: mod_base = OTHER; note = 2'-O-methyl modified nucleoside
  modified_base 6: mod_base = OTHER; note = 2'-fluoro-modified nucleoside
  modified_base 7: mod_base = OTHER; note = 2'-O-methyl modified nucleoside
  modified_base 8: mod_base = OTHER; note = 2'-fluoro-modified nucleoside
  modified_base 9: mod_base = OTHER; note = 2'-O-methyl modified nucleoside
  modified_base 10: mod_base = OTHER; note = 2'-fluoro-modified nucleoside
  modified_base 11: mod_base = OTHER; note = 2'-O-methyl modified nucleoside
  modified_base 12: mod_base = OTHER; note = 2'-fluoro-modified nucleoside
  modified_base 13: mod_base = OTHER; note = 2'-O-methyl modified nucleoside
  modified_base 14: mod_base = OTHER; note = 2'-fluoro-modified nucleoside
  modified_base 15: mod_base = OTHER; note = 2'-O-methyl modified nucleoside
  modified_base 16: mod_base = OTHER; note = 2'-fluoro-modified nucleoside
  modified_base 17: mod_base = OTHER; note = 2'-O-methyl modified nucleoside
  modified_base 18: mod_base = OTHER; note = 2'-fluoro-modified nucleoside
  modified_base 19: mod_base = OTHER; note = 2'-O-methyl modified nucleoside with phosphorothioate linkage
  modified_base 20: mod_base = OTHER; note = 2'-O-methyl modified nucleoside with phosphorothioate linkage
  modified_base 21: mod_base = OTHER; note = 2'-O-methyl modified nucleoside
taactgataaggataccgatt

SEQ ID NO: 4924 - RNA, 21 nt, synthetic construct
  source 1..21: mol_type = other RNA
  modified_base 1: mod_base = OTHER; note = 2'-O-methyl modified nucleoside with phosphorothioate linkage
  modified_base 2: mod_base = OTHER; note = 2'-fluoro-modified nucleoside with phosphorothioate linkage
  modified_base 3: mod_base = OTHER; note = 2'-O-methyl modified nucleoside
  modified_base 4: mod_base = OTHER; note = 2'-fluoro-modified nucleoside
  modified_base 5: mod_base = OTHER; note = 2'-O-methyl modified nucleoside
  modified_base 6: mod_base = OTHER; note = 2'-fluoro-modified nucleoside
  modified_base 7: mod_base = OTHER; note = 2'-O-methyl modified nucleoside
  modified_base 8: mod_base = OTHER; note = 2'-fluoro-modified nucleoside
  modified_base 9: mod_base = OTHER; note = 2'-O-methyl modified nucleoside
  modified_base 10: mod_base = OTHER; note = 2'-fluoro-modified nucleoside
  modified_base 11: mod_base = OTHER; note = 2'-O-methyl modified nucleoside
  modified_base 12: mod_base = OTHER; note = 2'-fluoro-modified nucleoside
  modified_base 13: mod_base = OTHER; note = 2'-O-methyl modified nucleoside
  modified_base 14: mod_base = OTHER; note = 2'-fluoro-modified nucleoside
  modified_base 15: mod_base = OTHER; note = 2'-O-methyl modified nucleoside
  modified_base 16: mod_base = OTHER; note = 2'-fluoro-modified nucleoside
  modified_base 17: mod_base = OTHER; note = 2'-O-methyl modified nucleoside
  modified_base 18: mod_base = OTHER; note = 2'-fluoro-modified nucleoside
  modified_base 19: mod_base = OTHER; note = 2'-O-methyl modified nucleoside with phosphorothioate linkage
  modified_base 20: mod_base = OTHER; note = 2'-O-methyl modified nucleoside with phosphorothioate linkage
  modified_base 21: mod_base = OTHER; note = 2'-O-methyl modified nucleoside
tgcttattgcattgattaatt

SEQ ID NO: 4925 - RNA, 21 nt, synthetic construct
  source 1..21: mol_type = other RNA
  modified_base 1: mod_base = OTHER; note = 2'-O-methyl modified nucleoside with phosphorothioate linkage
  modified_base 2: mod_base = OTHER; note = 2'-fluoro-modified nucleoside with phosphorothioate linkage
  modified_base 3: mod_base = OTHER; note = 2'-O-methyl modified nucleoside
  modified_base 4: mod_base = OTHER; note = 2'-fluoro-modified nucleoside
  modified_base 5: mod_base = OTHER; note = 2'-O-methyl modified nucleoside
  modified_base 6: mod_base = OTHER; note = 2'-fluoro-modified nucleoside
  modified_base 7: mod_base = OTHER; note = 2'-O-methyl modified nucleoside
  modified_base 8: mod_base = OTHER; note = 2'-fluoro-modified nucleoside
  modified_base 9: mod_base = OTHER; note = 2'-O-methyl modified nucleoside
  modified_base 10: mod_base = OTHER; note = 2'-fluoro-modified nucleoside
  modified_base 11: mod_base = OTHER; note = 2'-O-methyl modified nucleoside
  modified_base 12: mod_base = OTHER; note = 2'-fluoro-modified nucleoside
  modified_base 13: mod_base = OTHER; note = 2'-O-methyl modified nucleoside
  modified_base 14: mod_base = OTHER; note = 2'-fluoro-modified nucleoside
  modified_base 15: mod_base = OTHER; note = 2'-O-methyl modified nucleoside
  modified_base 16: mod_base = OTHER; note = 2'-fluoro-modified nucleoside
  modified_base 17: mod_base = OTHER; note = 2'-O-methyl modified nucleoside
  modified_base 18: mod_base = OTHER; note = 2'-fluoro-modified nucleoside
  modified_base 19: mod_base = OTHER; note = 2'-O-methyl modified nucleoside with phosphorothioate linkage
  modified_base 20: mod_base = OTHER; note = 2'-O-methyl modified nucleoside with phosphorothioate linkage
  modified_base 21: mod_base = OTHER; note = 2'-O-methyl modified nucleoside
tcaagcttattgcattgattt

SEQ ID NO: 4926 - RNA, 21 nt, synthetic construct
  source 1..21: mol_type = other RNA
  modified_base 1: mod_base = OTHER; note = 2'-O-methyl modified nucleoside with phosphorothioate linkage
  modified_base 2: mod_base = OTHER; note = 2'-fluoro-modified nucleoside with phosphorothioate linkage
  modified_base 3: mod_base = OTHER; note = 2'-O-methyl modified nucleoside
  modified_base 4: mod_base = OTHER; note = 2'-fluoro-modified nucleoside
  modified_base 5: mod_base = OTHER; note = 2'-O-methyl modified nucleoside
  modified_base 6: mod_base = OTHER; note = 2'-fluoro-modified nucleoside
  modified_base 7: mod_base = OTHER; note = 2'-O-methyl modified nucleoside
  modified_base 8: mod_base = OTHER; note = 2'-fluoro-modified nucleoside
  modified_base 9: mod_base = OTHER; note = 2'-O-methyl modified nucleoside
  modified_base 10: mod_base = OTHER; note = 2'-fluoro-modified nucleoside
  modified_base 11: mod_base = OTHER; note = 2'-O-methyl modified nucleoside
  modified_base 12: mod_base = OTHER; note = 2'-fluoro-modified nucleoside
  modified_base 13: mod_base = OTHER; note = 2'-O-methyl modified nucleoside
  modified_base 14: mod_base = OTHER; note = 2'-fluoro-modified nucleoside
  modified_base 15: mod_base = OTHER; note = 2'-O-methyl modified nucleoside
  modified_base 16: mod_base = OTHER; note = 2'-fluoro-modified nucleoside
  modified_base 17: mod_base = OTHER; note = 2'-O-methyl modified nucleoside
  modified_base 18: mod_base = OTHER; note = 2'-fluoro-modified nucleoside
  modified_base 19: mod_base = OTHER; note = 2'-O-methyl modified nucleoside with phosphorothioate linkage
  modified_base 20: mod_base = OTHER; note = 2'-O-methyl modified nucleoside with phosphorothioate linkage
  modified_base 21: mod_base = OTHER; note = 2'-O-methyl modified nucleoside
ttcaagcttattgcattgatt

SEQ ID NO: 4927 - RNA, 21 nt, synthetic construct
  source 1..21: mol_type = other RNA
  modified_base 1: mod_base = OTHER; note = 2'-O-methyl modified nucleoside with phosphorothioate linkage
  modified_base 2: mod_base = OTHER; note = 2'-fluoro-modified nucleoside with phosphorothioate linkage
  modified_base 3: mod_base = OTHER; note = 2'-O-methyl modified nucleoside
  modified_base 4: mod_base = OTHER; note = 2'-fluoro-modified nucleoside
  modified_base 5: mod_base = OTHER; note = 2'-O-methyl modified nucleoside
  modified_base 6: mod_base = OTHER; note = 2'-fluoro-modified nucleoside
  modified_base 7: mod_base = OTHER; note = 2'-O-methyl modified nucleoside
  modified_base 8: mod_base = OTHER; note = 2'-fluoro-modified nucleoside
  modified_base 9: mod_base = OTHER; note = 2'-O-methyl modified nucleoside
  modified_base 10: mod_base = OTHER; note = 2'-fluoro-modified nucleoside
  modified_base 11: mod_base = OTHER; note = 2'-O-methyl modified nucleoside
  modified_base 12: mod_base = OTHER; note = 2'-fluoro-modified nucleoside
  modified_base 13: mod_base = OTHER; note = 2'-O-methyl modified nucleoside
  modified_base 14: mod_base = OTHER; note = 2'-fluoro-modified nucleoside
  modified_base 15: mod_base = OTHER; note = 2'-O-methyl modified nucleoside
  modified_base 16: mod_base = OTHER; note = 2'-fluoro-modified nucleoside
  modified_base 17: mod_base = OTHER; note = 2'-O-methyl modified nucleoside
  modified_base 18: mod_base = OTHER; note = 2'-fluoro-modified nucleoside
  modified_base 19: mod_base = OTHER; note = 2'-O-methyl modified nucleoside with phosphorothioate linkage
  modified_base 20: mod_base = OTHER; note = 2'-O-methyl modified nucleoside with phosphorothioate linkage
  modified_base 21: mod_base = OTHER; note = 2'-O-methyl modified nucleoside
tcgtcaagcttattgcatttt

SEQ ID NO: 4928 - RNA, 21 nt, synthetic construct
  source 1..21: mol_type = other RNA
  modified_base 1: mod_base = OTHER; note = 2'-O-methyl modified nucleoside with phosphorothioate linkage
  modified_base 2: mod_base = OTHER; note = 2'-fluoro-modified nucleoside with phosphorothioate linkage
  modified_base 3: mod_base = OTHER; note = 2'-O-methyl modified nucleoside
  modified_base 4: mod_base = OTHER; note = 2'-fluoro-modified nucleoside
  modified_base 5: mod_base = OTHER; note = 2'-O-methyl modified nucleoside
  modified_base 6: mod_base = OTHER; note = 2'-fluoro-modified nucleoside
  modified_base 7: mod_base = OTHER; note = 2'-O-methyl modified nucleoside
  modified_base 8: mod_base = OTHER; note = 2'-fluoro-modified nucleoside
  modified_base 9: mod_base = OTHER; note = 2'-O-methyl modified nucleoside
  modified_base 10: mod_base = OTHER; note = 2'-fluoro-modified nucleoside
  modified_base 11: mod_base = OTHER; note = 2'-O-methyl modified nucleoside
  modified_base 12: mod_base = OTHER; note = 2'-fluoro-modified nucleoside
  modified_base 13: mod_base = OTHER; note = 2'-O-methyl modified nucleoside
  modified_base 14: mod_base = OTHER; note = 2'-fluoro-modified nucleoside
  modified_base 15: mod_base = OTHER; note = 2'-O-methyl modified nucleoside
  modified_base 16: mod_base = OTHER; note = 2'-fluoro-modified nucleoside
  modified_base 17: mod_base = OTHER; note = 2'-O-methyl modified nucleoside
  modified_base 18: mod_base = OTHER; note = 2'-fluoro-modified nucleoside
  modified_base 19: mod_base = OTHER; note = 2'-O-methyl modified nucleoside with phosphorothioate linkage
  modified_base 20: mod_base = OTHER; note = 2'-O-methyl modified nucleoside with phosphorothioate linkage
  modified_base 21: mod_base = OTHER; note = 2'-O-methyl modified nucleoside
taatggtaacggaatgaattt

SEQ ID NO: 4929 - RNA, 21 nt, synthetic construct
  source 1..21: mol_type = other RNA
  modified_base 1: mod_base = OTHER; note = 2'-O-methyl modified nucleoside with phosphorothioate linkage
  modified_base 2: mod_base = OTHER; note = 2'-fluoro-modified nucleoside with phosphorothioate linkage
  modified_base 3: mod_base = OTHER; note = 2'-O-methyl modified nucleoside
  modified_base 4: mod_base = OTHER; note = 2'-fluoro-modified nucleoside
  modified_base 5: mod_base = OTHER; note = 2'-O-methyl modified nucleoside
  modified_base 6: mod_base = OTHER; note = 2'-fluoro-modified nucleoside
  modified_base 7: mod_base = OTHER; note = 2'-O-methyl modified nucleoside
  modified_base 8: mod_base = OTHER; note = 2'-fluoro-modified nucleoside
  modified_base 9: mod_base = OTHER; note = 2'-O-methyl modified nucleoside
  modified_base 10: mod_base = OTHER; note = 2'-fluoro-modified nucleoside
  modified_base 11: mod_base = OTHER; note = 2'-O-methyl modified nucleoside
  modified_base 12: mod_base = OTHER; note = 2'-fluoro-modified nucleoside
  modified_base 13: mod_base = OTHER; note = 2'-O-methyl modified nucleoside
  modified_base 14: mod_base = OTHER; note = 2'-fluoro-modified nucleoside
  modified_base 15: mod_base = OTHER; note = 2'-O-methyl modified nucleoside
  modified_base 16: mod_base = OTHER; note = 2'-fluoro-modified nucleoside
  modified_base 17: mod_base = OTHER; note = 2'-O-methyl modified nucleoside
  modified_base 18: mod_base = OTHER; note = 2'-fluoro-modified nucleoside
  modified_base 19: mod_base = OTHER; note = 2'-O-methyl modified nucleoside with phosphorothioate linkage
  modified_base 20: mod_base = OTHER; note = 2'-O-methyl modified nucleoside with phosphorothioate linkage
  modified_base 21: mod_base = OTHER; note = 2'-O-methyl modified nucleoside
tgatcgtggttacagtaattt

SEQ ID NO: 4930 - RNA, 21 nt, synthetic construct
  source 1..21: mol_type = other RNA
  modified_base 1: mod_base = OTHER; note = 2'-O-methyl modified nucleoside with phosphorothioate linkage
  modified_base 2: mod_base = OTHER; note = 2'-fluoro-modified nucleoside with phosphorothioate linkage
  modified_base 3: mod_base = OTHER; note = 2'-O-methyl modified nucleoside
  modified_base 4: mod_base = OTHER; note = 2'-fluoro-modified nucleoside
  modified_base 5: mod_base = OTHER; note = 2'-O-methyl modified nucleoside
  modified_base 6: mod_base = OTHER; note = 2'-fluoro-modified nucleoside
  modified_base 7: mod_base = OTHER; note = 2'-O-methyl modified nucleoside
  modified_base 8: mod_base = OTHER; note = 2'-fluoro-modified nucleoside
  modified_base 9: mod_base = OTHER; note = 2'-O-methyl modified nucleoside
  modified_base 10: mod_base = OTHER; note = 2'-fluoro-modified nucleoside
  modified_base 11: mod_base = OTHER; note = 2'-O-methyl modified nucleoside
  modified_base 12: mod_base = OTHER; note = 2'-fluoro-modified nucleoside
  modified_base 13: mod_base = OTHER; note = 2'-O-methyl modified nucleoside
  modified_base 14: mod_base = OTHER; note = 2'-fluoro-modified nucleoside
  modified_base 15: mod_base = OTHER; note = 2'-O-methyl modified nucleoside
  modified_base 16: mod_base = OTHER; note = 2'-fluoro-modified nucleoside
  modified_base 17: mod_base = OTHER; note = 2'-O-methyl modified nucleoside
  modified_base 18: mod_base = OTHER; note = 2'-fluoro-modified nucleoside
  modified_base 19: mod_base = OTHER; note = 2'-O-methyl modified nucleoside with phosphorothioate linkage
  modified_base 20: mod_base = OTHER; note = 2'-O-methyl modified nucleoside with phosphorothioate linkage
  modified_base 21: mod_base = OTHER; note = 2'-O-methyl modified nucleoside
taattacttgacaactgattt

SEQ ID NO: 4931 - RNA, 21 nt, synthetic construct
  source 1..21: mol_type = other RNA
  modified_base 1: mod_base = OTHER; note = 2'-O-methyl modified nucleoside with phosphorothioate linkage
  modified_base 2: mod_base = OTHER; note = 2'-fluoro-modified nucleoside with phosphorothioate linkage
  modified_base 3: mod_base = OTHER; note = 2'-O-methyl modified nucleoside
  modified_base 4: mod_base = OTHER; note = 2'-fluoro-modified nucleoside
  modified_base 5: mod_base = OTHER; note = 2'-O-methyl modified nucleoside
  modified_base 6: mod_base = OTHER; note = 2'-fluoro-modified nucleoside
  modified_base 7: mod_base = OTHER; note = 2'-O-methyl modified nucleoside
  modified_base 8: mod_base = OTHER; note = 2'-fluoro-modified nucleoside
  modified_base 9: mod_base = OTHER; note = 2'-O-methyl modified nucleoside
  modified_base 10: mod_base = OTHER; note = 2'-fluoro-modified nucleoside
  modified_base 11: mod_base = OTHER; note = 2'-O-methyl modified nucleoside
  modified_base 12: mod_base = OTHER; note = 2'-fluoro-modified nucleoside
  modified_base 13: mod_base = OTHER; note = 2'-O-methyl modified nucleoside
  modified_base 14: mod_base = OTHER; note = 2'-fluoro-modified nucleoside
  modified_base 15: mod_base = OTHER; note = 2'-O-methyl modified nucleoside
  modified_base 16: mod_base = OTHER; note = 2'-fluoro-modified nucleoside
  modified_base 17: mod_base = OTHER; note = 2'-O-methyl modified nucleoside
  modified_base 18: mod_base = OTHER; note = 2'-fluoro-modified nucleoside
  modified_base 19: mod_base = OTHER; note = 2'-O-methyl modified nucleoside with phosphorothioate linkage
  modified_base 20: mod_base = OTHER; note = 2'-O-methyl modified nucleoside with phosphorothioate linkage
  modified_base 21: mod_base = OTHER; note = 2'-O-methyl modified nucleoside
ttgtaacaattacttgacatt

SEQ ID NO: 4932 - RNA, 21 nt, synthetic construct
  source 1..21: mol_type = other RNA
  modified_base 1: mod_base = OTHER; note = 2'-O-methyl modified nucleoside with phosphorothioate linkage
  modified_base 2: mod_base = OTHER; note = 2'-fluoro-modified nucleoside with phosphorothioate linkage
  modified_base 3: mod_base = OTHER; note = 2'-O-methyl modified nucleoside
  modified_base 4: mod_base = OTHER; note = 2'-fluoro-modified nucleoside
  modified_base 5: mod_base = OTHER; note = 2'-O-methyl modified nucleoside
  modified_base 6: mod_base = OTHER; note = 2'-fluoro-modified nucleoside
  modified_base 7: mod_base = OTHER; note = 2'-O-methyl modified nucleoside
  modified_base 8: mod_base = OTHER; note = 2'-fluoro-modified nucleoside
  modified_base 9: mod_base = OTHER; note = 2'-O-methyl modified nucleoside
  modified_base 10: mod_base = OTHER; note = 2'-fluoro-modified nucleoside
  modified_base 11: mod_base = OTHER; note = 2'-O-methyl modified nucleoside
  modified_base 12: mod_base = OTHER; note = 2'-fluoro-modified nucleoside
  modified_base 13: mod_base = OTHER; note = 2'-O-methyl modified nucleoside
  modified_base 14: mod_base = OTHER; note = 2'-fluoro-modified nucleoside
  modified_base 15: mod_base = OTHER; note = 2'-O-methyl modified nucleoside
  modified_base 16: mod_base = OTHER; note = 2'-fluoro-modified nucleoside
  modified_base 17: mod_base = OTHER; note = 2'-O-methyl modified nucleoside
  modified_base 18: mod_base = OTHER; note = 2'-fluoro-modified nucleoside
  modified_base 19: mod_base = OTHER; note = 2'-O-methyl modified nucleoside with phosphorothioate linkage
  modified_base 20: mod_base = OTHER; note = 2'-O-methyl modified nucleoside with phosphorothioate linkage
  modified_base 21: mod_base = OTHER; note = 2'-O-methyl modified nucleoside
tggacatagtcatgtaacatt

SEQ ID NO: 4933 - RNA, 21 nt, synthetic construct
  source 1..21: mol_type = other RNA
  modified_base 1: mod_base = OTHER; note = 2'-O-methyl modified nucleoside with phosphorothioate linkage
  modified_base 2: mod_base = OTHER; note = 2'-fluoro-modified nucleoside with phosphorothioate linkage
  modified_base 3: mod_base = OTHER; note = 2'-O-methyl modified nucleoside
  modified_base 4: mod_base = OTHER; note = 2'-fluoro-modified nucleoside
  modified_base 5: mod_base = OTHER; note = 2'-O-methyl modified nucleoside
  modified_base 6: mod_base = OTHER; note = 2'-fluoro-modified nucleoside
  modified_base 7: mod_base = OTHER; note = 2'-O-methyl modified nucleoside
  modified_base 8: mod_base = OTHER; note = 2'-fluoro-modified nucleoside
  modified_base 9: mod_base = OTHER; note = 2'-O-methyl modified nucleoside
  modified_base 10: mod_base = OTHER; note = 2'-fluoro-modified nucleoside
  modified_base 11: mod_base = OTHER; note = 2'-O-methyl modified nucleoside
  modified_base 12: mod_base = OTHER; note = 2'-fluoro-modified nucleoside
  modified_base 13: mod_base = OTHER; note = 2'-O-methyl modified nucleoside
  modified_base 14: mod_base = OTHER; note = 2'-fluoro-modified nucleoside
  modified_base 15: mod_base = OTHER; note = 2'-O-methyl modified nucleoside
  modified_base 16: mod_base = OTHER; note = 2'-fluoro-modified nucleoside
  modified_base 17: mod_base = OTHER; note = 2'-O-methyl modified nucleoside
  modified_base 18: mod_base = OTHER; note = 2'-fluoro-modified nucleoside
  modified_base 19: mod_base = OTHER; note = 2'-O-methyl modified nucleoside with phosphorothioate linkage
  modified_base 20: mod_base = OTHER; note = 2'-O-methyl modified nucleoside with phosphorothioate linkage
  modified_base 21: mod_base = OTHER; note = 2'-O-methyl modified nucleoside
taatggacatagtcatgtatt

SEQ ID NO: 4934 - RNA, 21 nt, synthetic construct
  source 1..21: mol_type = other RNA
  modified_base 1: mod_base = OTHER; note = 2'-O-methyl modified nucleoside with phosphorothioate linkage
  modified_base 2: mod_base = OTHER; note = 2'-fluoro-modified nucleoside with phosphorothioate linkage
  modified_base 3: mod_base = OTHER; note = 2'-O-methyl modified nucleoside
  modified_base 4: mod_base = OTHER; note = 2'-fluoro-modified nucleoside
  modified_base 5: mod_base = OTHER; note = 2'-O-methyl modified nucleoside
  modified_base 6: mod_base = OTHER; note = 2'-fluoro-modified nucleoside
  modified_base 7: mod_base = OTHER; note = 2'-O-methyl modified nucleoside
  modified_base 8: mod_base = OTHER; note = 2'-fluoro-modified nucleoside
  modified_base 9: mod_base = OTHER; note = 2'-O-methyl modified nucleoside
  modified_base 10: mod_base = OTHER; note = 2'-fluoro-modified nucleoside
  modified_base 11: mod_base = OTHER; note = 2'-O-methyl modified nucleoside
  modified_base 12: mod_base = OTHER; note = 2'-fluoro-modified nucleoside
  modified_base 13: mod_base = OTHER; note = 2'-O-methyl modified nucleoside
  modified_base 14: mod_base = OTHER; note = 2'-fluoro-modified nucleoside
  modified_base 15: mod_base = OTHER; note = 2'-O-methyl modified nucleoside
  modified_base 16: mod_base = OTHER; note = 2'-fluoro-modified nucleoside
  modified_base 17: mod_base = OTHER; note = 2'-O-methyl modified nucleoside
  modified_base 18: mod_base = OTHER; note = 2'-fluoro-modified nucleoside
  modified_base 19: mod_base = OTHER; note = 2'-O-methyl modified nucleoside with phosphorothioate linkage
  modified_base 20: mod_base = OTHER; note = 2'-O-methyl modified nucleoside with phosphorothioate linkage
  modified_base 21: mod_base = OTHER; note = 2'-O-methyl modified nucleoside
ttccgtacccattaaaatgtt

SEQ ID NO: 4935 - RNA, 21 nt, synthetic construct
  source 1..21: mol_type = other RNA
  modified_base 1: mod_base = OTHER; note = 2'-O-methyl modified nucleoside with phosphorothioate linkage
  modified_base 2: mod_base = OTHER; note = 2'-fluoro-modified nucleoside with phosphorothioate linkage
  modified_base 3: mod_base = OTHER; note = 2'-O-methyl modified nucleoside
  modified_base 4: mod_base = OTHER; note = 2'-fluoro-modified nucleoside
  modified_base 5: mod_base = OTHER; note = 2'-O-methyl modified nucleoside
  modified_base 6: mod_base = OTHER; note = 2'-fluoro-modified nucleoside
  modified_base 7: mod_base = OTHER; note = 2'-O-methyl modified nucleoside
  modified_base 8: mod_base = OTHER; note = 2'-fluoro-modified nucleoside
  modified_base 9: mod_base = OTHER; note = 2'-O-methyl modified nucleoside
  modified_base 10: mod_base = OTHER; note = 2'-fluoro-modified nucleoside
  modified_base 11: mod_base = OTHER; note = 2'-O-methyl modified nucleoside
  modified_base 12: mod_base = OTHER; note = 2'-fluoro-modified nucleoside
  modified_base 13: mod_base = OTHER; note = 2'-O-methyl modified nucleoside
  modified_base 14: mod_base = OTHER; note = 2'-fluoro-modified nucleoside
  modified_base 15: mod_base = OTHER; note = 2'-O-methyl modified nucleoside
  modified_base 16: mod_base = OTHER; note = 2'-fluoro-modified nucleoside
  modified_base 17: mod_base = OTHER; note = 2'-O-methyl modified nucleoside
  modified_base 18: mod_base = OTHER; note = 2'-fluoro-modified nucleoside
  modified_base 19: mod_base = OTHER; note = 2'-O-methyl modified nucleoside with phosphorothioate linkage
  modified_base 20: mod_base = OTHER; note = 2'-O-methyl modified nucleoside with phosphorothioate linkage
  modified_base 21: mod_base = OTHER; note = 2'-O-methyl modified nucleoside
tagcactcgataaatactttt

SEQ ID NO: 4936 - RNA, 21 nt, synthetic construct
  source 1..21: mol_type = other RNA
  modified_base 1: mod_base = OTHER; note = 2'-O-methyl modified nucleoside with phosphorothioate linkage
  modified_base 2: mod_base = OTHER; note = 2'-fluoro-modified nucleoside with phosphorothioate linkage
  modified_base 3: mod_base = OTHER; note = 2'-O-methyl modified nucleoside
  modified_base 4: mod_base = OTHER; note = 2'-fluoro-modified nucleoside
  modified_base 5: mod_base = OTHER; note = 2'-O-methyl modified nucleoside
  modified_base 6: mod_base = OTHER; note = 2'-fluoro-modified nucleoside
  modified_base 7: mod_base = OTHER; note = 2'-O-methyl modified nucleoside
  modified_base 8: mod_base = OTHER; note = 2'-fluoro-modified nucleoside
  modified_base 9: mod_base = OTHER; note = 2'-O-methyl modified nucleoside
  modified_base 10: mod_base = OTHER; note = 2'-fluoro-modified nucleoside
  modified_base 11: mod_base = OTHER; note = 2'-O-methyl modified nucleoside
  modified_base 12: mod_base = OTHER; note = 2'-fluoro-modified nucleoside
  modified_base 13: mod_base = OTHER; note = 2'-O-methyl modified nucleoside
  modified_base 14: mod_base = OTHER; note = 2'-fluoro-modified nucleoside
  modified_base 15: mod_base = OTHER; note = 2'-O-methyl modified nucleoside
  modified_base 16: mod_base = OTHER; note = 2'-fluoro-modified nucleoside
  modified_base 17: mod_base = OTHER; note = 2'-O-methyl modified nucleoside
  modified_base 18: mod_base = OTHER; note = 2'-fluoro-modified nucleoside
  modified_base 19: mod_base = OTHER; note = 2'-O-methyl modified nucleoside with phosphorothioate linkage
  modified_base 20: mod_base = OTHER; note = 2'-O-methyl modified nucleoside with phosphorothioate linkage
  modified_base 21: mod_base = OTHER; note = 2'-O-methyl modified nucleoside
tcattgagcactcgataaatt

SEQ ID NO: 4937 - RNA, 21 nt, synthetic construct
  source 1..21: mol_type = other RNA
  modified_base 1: mod_base = OTHER; note = 2'-O-methyl modified nucleoside
  modified_base 2: mod_base = OTHER; note = 2'-O-methyl modified nucleoside
  modified_base 3: mod_base = OTHER; note = 2'-O-methyl modified nucleoside
  modified_base 4: mod_base = OTHER; note = 2'-O-methyl modified nucleoside
  modified_base 5: mod_base = OTHER; note = 2'-O-methyl modified nucleoside
  modified_base 6: mod_base = OTHER; note = 2'-fluoro-modified nucleoside
  modified_base 7: mod_base = OTHER; note = 2'-O-methyl modified nucleoside
  modified_base 8: mod_base = OTHER; note = 2'-O-methyl modified nucleoside
  modified_base 9: mod_base = OTHER; note = 2'-fluoro-modified nucleoside
  modified_base 10: mod_base = OTHER; note = 2'-O-methyl modified nucleoside
  modified_base 11: mod_base = OTHER; note = 2'-fluoro-modified nucleoside
  modified_base 12: mod_base = OTHER; note = 2'-O-methyl modified nucleoside
  modified_base 13: mod_base = OTHER; note = 2'-O-methyl modified nucleoside
  modified_base 14: mod_base = OTHER; note = 2'-O-methyl modified nucleoside
  modified_base 15: mod_base = OTHER; note = 2'-O-methyl modified nucleoside
  modified_base 16: mod_base = OTHER; note = 2'-O-methyl modified nucleoside
  modified_base 17: mod_base = OTHER; note = 2'-O-methyl modified nucleoside
  modified_base 18: mod_base = OTHER; note = 2'-O-methyl modified nucleoside
  modified_base 19: mod_base = OTHER; note = 2'-O-methyl modified nucleoside with phosphorothioate linkage
  modified_base 20: mod_base = OTHER; note = 2'-O-methyl modified nucleoside with phosphorothioate linkage
  modified_base 21: mod_base = OTHER; note = 2'-O-methyl modified nucleoside
gttctcaacacatcctttatt

SEQ ID NO: 4938 - RNA, 21 nt, synthetic construct
  source 1..21: mol_type = other RNA
  modified_base 1: mod_base = OTHER; note = 2'-O-methyl modified nucleoside
  modified_base 2: mod_base = OTHER; note = 2'-O-methyl modified nucleoside
  modified_base 3: mod_base = OTHER; note = 2'-O-methyl modified nucleoside
  modified_base 4: mod_base = OTHER; note = 2'-O-methyl modified nucleoside
  modified_base 5: mod_base = OTHER; note = 2'-fluoro-modified nucleoside
  modified_base 6: mod_base = OTHER; note = 2'-O-methyl modified nucleoside
  modified_base 7: mod_base = OTHER; note = 2'-O-methyl modified nucleoside
  modified_base 8: mod_base = OTHER; note = 2'-O-methyl modified nucleoside
  modified_base 9: mod_base = OTHER; note = 2'-fluoro-modified nucleoside
  modified_base 10: mod_base = OTHER; note = 2'-O-methyl modified nucleoside
  modified_base 11: mod_base = OTHER; note = 2'-fluoro-modified nucleoside
  modified_base 12: mod_base = OTHER; note = 2'-O-methyl modified nucleoside
  modified_base 13: mod_base = OTHER; note = 2'-O-methyl modified nucleoside
  modified_base 14: mod_base = OTHER; note = 2'-O-methyl modified nucleoside
  modified_base 15: mod_base = OTHER; note = 2'-O-methyl modified nucleoside
  modified_base 16: mod_base = OTHER; note = 2'-O-methyl modified nucleoside
  modified_base 17: mod_base = OTHER; note = 2'-O-methyl modified nucleoside
  modified_base 18: mod_base = OTHER; note = 2'-O-methyl modified nucleoside
  modified_base 19: mod_base = OTHER; note = 2'-O-methyl modified nucleoside with phosphorothioate linkage
  modified_base 20: mod_base = OTHER; note = 2'-O-methyl modified nucleoside with phosphorothioate linkage
  modified_base 21: mod_base = OTHER; note = 2'-O-methyl modified nucleoside
gttctcaacacatcctttatt

SEQ ID NO: 4939 - RNA, 21 nt, synthetic construct
  source 1..21: mol_type = other RNA
  modified_base 1: mod_base = OTHER; note = 2'-O-methyl modified nucleoside
  modified_base 2: mod_base = OTHER; note = 2'-O-methyl modified nucleoside
  modified_base 3: mod_base = OTHER; note = 2'-O-methyl modified nucleoside
  modified_base 4: mod_base = OTHER; note = 2'-O-methyl modified nucleoside
  modified_base 5: mod_base = OTHER; note = 2'-fluoro-modified nucleoside
  modified_base 6: mod_base = OTHER; note = 2'-fluoro-modified nucleoside
  modified_base 7: mod_base = OTHER; note = 2'-O-methyl modified nucleoside
  modified_base 8: mod_base = OTHER; note = 2'-O-methyl modified nucleoside
  modified_base 9: mod_base = OTHER; note = 2'-fluoro-modified nucleoside
  modified_base 10: mod_base = OTHER; note = 2'-O-methyl modified nucleoside
  modified_base 11: mod_base = OTHER; note = 2'-O-methyl modified nucleoside
  modified_base 12: mod_base = OTHER; note = 2'-O-methyl modified nucleoside
  modified_base 13: mod_base = OTHER; note = 2'-O-methyl modified nucleoside
  modified_base 14: mod_base = OTHER; note = 2'-O-methyl modified nucleoside
  modified_base 15: mod_base = OTHER; note = 2'-O-methyl modified nucleoside
  modified_base 16: mod_base = OTHER; note = 2'-O-methyl modified nucleoside
  modified_base 17: mod_base = OTHER; note = 2'-O-methyl modified nucleoside
  modified_base 18: mod_base = OTHER; note = 2'-O-methyl modified nucleoside
  modified_base 19: mod_base = OTHER; note = 2'-O-methyl modified nucleoside with phosphorothioate linkage
  modified_base 20: mod_base = OTHER; note = 2'-O-methyl modified nucleoside with phosphorothioate linkage
  modified_base 21: mod_base = OTHER; note = 2'-O-methyl modified nucleoside
gttctcaacacatcctttatt

SEQ ID NO: 4940 - RNA, 21 nt, synthetic construct
  source 1..21: mol_type = other RNA
  modified_base 1: mod_base = OTHER; note = 2'-O-methyl modified nucleoside
  modified_base 2: mod_base = OTHER; note = 2'-O-methyl modified nucleoside
  modified_base 3: mod_base = OTHER; note = 2'-O-methyl modified nucleoside
  modified_base 4: mod_base = OTHER; note = 2'-O-methyl modified nucleoside
  modified_base 5: mod_base = OTHER; note = 2'-fluoro-modified nucleoside
  modified_base 6: mod_base = OTHER; note = 2'-fluoro-modified nucleoside
  modified_base 7: mod_base = OTHER; note = 2'-O-methyl modified nucleoside
  modified_base 8: mod_base = OTHER; note = 2'-O-methyl modified nucleoside
  modified_base 9: mod_base = OTHER; note = 2'-fluoro-modified nucleoside
  modified_base 10: mod_base = OTHER; note = 2'-O-methyl modified nucleoside
  modified_base 11: mod_base = OTHER; note = 2'-fluoro-modified nucleoside
  modified_base 12: mod_base = OTHER; note = 2'-O-methyl modified nucleoside
  modified_base 13: mod_base = OTHER; note = 2'-O-methyl modified nucleoside
  modified_base 14: mod_base = OTHER; note = 2'-O-methyl modified nucleoside
  modified_base 15: mod_base = OTHER; note = 2'-O-methyl modified nucleoside
  modified_base 16: mod_base = OTHER; note = 2'-O-methyl modified nucleoside
  modified_base 17: mod_base = OTHER; note = 2'-O-methyl modified nucleoside
  modified_base 18: mod_base = OTHER; note = 2'-O-methyl modified nucleoside
  modified_base 19: mod_base = OTHER; note = 2'-O-methyl modified nucleoside with phosphorothioate linkage
  modified_base 20: mod_base = OTHER; note = 2'-O-methyl modified nucleoside with phosphorothioate linkage
  modified_base 21: mod_base = OTHER; note = 2'-O-methyl modified nucleoside
gttctcaacacatcctttatt

SEQ ID NO: 4941 - RNA, 21 nt, synthetic construct
  source 1..21: mol_type = other RNA
  modified_base 1: mod_base = OTHER; note = 2'-O-methyl modified nucleoside
  modified_base 2: mod_base = OTHER; note = 2'-O-methyl modified nucleoside
  modified_base 3: mod_base = OTHER; note = 2'-O-methyl modified nucleoside
  modified_base 4: mod_base = OTHER; note = 2'-O-methyl modified nucleoside
  modified_base 5: mod_base = OTHER; note = 2'-O-methyl modified nucleoside
  modified_base 6: mod_base = OTHER; note = 2'-fluoro-modified nucleoside
  modified_base 7: mod_base = OTHER; note = 2'-fluoro-modified nucleoside
  modified_base 8: mod_base = OTHER; note = 2'-O-methyl modified nucleoside
  modified_base 9: mod_base = OTHER; note = 2'-fluoro-modified nucleoside
  modified_base 10: mod_base = OTHER; note = 2'-O-methyl modified nucleoside
  modified_base 11: mod_base = OTHER; note = 2'-O-methyl modified nucleoside
  modified_base 12: mod_base = OTHER; note = 2'-O-methyl modified nucleoside
  modified_base 13: mod_base = OTHER; note = 2'-O-methyl modified nucleoside
  modified_base 14: mod_base = OTHER; note = 2'-O-methyl modified nucleoside
  modified_base 15: mod_base = OTHER; note = 2'-O-methyl modified nucleoside
  modified_base 16: mod_base = OTHER; note = 2'-O-methyl modified nucleoside
  modified_base 17: mod_base = OTHER; note = 2'-O-methyl modified nucleoside
  modified_base 18: mod_base = OTHER; note = 2'-O-methyl modified nucleoside
  modified_base 19: mod_base = OTHER; note = 2'-O-methyl modified nucleoside with phosphorothioate linkage
  modified_base 20: mod_base = OTHER; note = 2'-O-methyl modified nucleoside with phosphorothioate linkage
  modified_base 21: mod_base = OTHER; note = 2'-O-methyl modified nucleoside
ttccaaacatctactagaatt

SEQ ID NO: 4942 - RNA, 21 nt, synthetic construct
  source 1..21: mol_type = other RNA
  modified_base 1: mod_base = OTHER; note = 2'-O-methyl modified nucleoside
  modified_base 2: mod_base = OTHER; note = 2'-O-methyl modified nucleoside
  modified_base 3: mod_base = OTHER; note = 2'-O-methyl modified nucleoside
  modified_base 4: mod_base = OTHER; note = 2'-O-methyl modified nucleoside
  modified_base 5: mod_base = OTHER; note = 2'-fluoro-modified nucleoside
  modified_base 6: mod_base = OTHER; note = 2'-O-methyl modified nucleoside
  modified_base 7: mod_base = OTHER; note = 2'-fluoro-modified nucleoside
  modified_base 8: mod_base = OTHER; note = 2'-O-methyl modified nucleoside
  modified_base 9: mod_base = OTHER; note = 2'-fluoro-modified nucleoside
  modified_base 10: mod_base = OTHER; note = 2'-O-methyl modified nucleoside
  modified_base 11: mod_base = OTHER; note = 2'-O-methyl modified nucleoside
  modified_base 12: mod_base = OTHER; note = 2'-O-methyl modified nucleoside
  modified_base 13: mod_base = OTHER; note = 2'-O-methyl modified nucleoside
  modified_base 14: mod_base = OTHER; note = 2'-O-methyl modified nucleoside
  modified_base 15: mod_base = OTHER; note = 2'-O-methyl modified nucleoside
  modified_base 16: mod_base = OTHER; note = 2'-O-methyl modified nucleoside
  modified_base 17: mod_base = OTHER; note = 2'-O-methyl modified nucleoside
  modified_base 18: mod_base = OTHER; note = 2'-O-methyl modified nucleoside
  modified_base 19: mod_base = OTHER; note = 2'-O-methyl modified nucleoside with phosphorothioate linkage
  modified_base 20: mod_base = OTHER; note = 2'-O-methyl modified nucleoside with phosphorothioate linkage
  modified_base 21: mod_base = OTHER; note = 2'-O-methyl modified nucleoside
ttccaaacatctactagaatt

SEQ ID NO: 4943 - RNA, 21 nt, synthetic construct
  source 1..21: mol_type = other RNA
  modified_base 1: mod_base = OTHER; note = 2'-O-methyl modified nucleoside
  modified_base 2: mod_base = OTHER; note = 2'-O-methyl modified nucleoside
  modified_base 3: mod_base = OTHER; note = 2'-O-methyl modified nucleoside
  modified_base 4: mod_base = OTHER; note = 2'-O-methyl modified nucleoside
  modified_base 5: mod_base = OTHER; note = 2'-fluoro-modified nucleoside
  modified_base 6: mod_base = OTHER; note = 2'-fluoro-modified nucleoside
  modified_base 7: mod_base = OTHER; note = 2'-O-methyl modified nucleoside
  modified_base 8: mod_base = OTHER; note = 2'-O-methyl modified nucleoside
  modified_base 9: mod_base = OTHER; note = 2'-fluoro-modified nucleoside
  modified_base 10: mod_base = OTHER; note = 2'-O-methyl modified nucleoside
  modified_base 11: mod_base = OTHER; note = 2'-O-methyl modified nucleoside
  modified_base 12: mod_base = OTHER; note = 2'-O-methyl modified nucleoside
  modified_base 13: mod_base = OTHER; note = 2'-O-methyl modified nucleoside
  modified_base 14: mod_base = OTHER; note = 2'-O-methyl modified nucleoside
  modified_base 15: mod_base = OTHER; note = 2'-O-methyl modified nucleoside
  modified_base 16: mod_base = OTHER; note = 2'-O-methyl modified nucleoside
  modified_base 17: mod_base = OTHER; note = 2'-O-methyl modified nucleoside
  modified_base 18: mod_base = OTHER; note = 2'-O-methyl modified nucleoside
  modified_base 19: mod_base = OTHER; note = 2'-O-methyl modified nucleoside with phosphorothioate linkage
  modified_base 20: mod_base = OTHER; note = 2'-O-methyl modified nucleoside with phosphorothioate linkage
  modified_base 21: mod_base = OTHER; note = 2'-O-methyl modified nucleoside
ttccaaacatctactagaatt

SEQ ID NO: 4944 - RNA, 21 nt, synthetic construct
  source 1..21: mol_type = other RNA
  modified_base 1: mod_base = OTHER; note = 2'-O-methyl modified nucleoside
  modified_base 2: mod_base = OTHER; note = 2'-O-methyl modified nucleoside
  modified_base 3: mod_base = OTHER; note = 2'-O-methyl modified nucleoside
  modified_base 4: mod_base = OTHER; note = 2'-O-methyl modified nucleoside
  modified_base 5: mod_base = OTHER; note = 2'-O-methyl modified nucleoside
  modified_base 6: mod_base = OTHER; note = 2'-O-methyl modified nucleoside
  modified_base 7: mod_base = OTHER; note = 2'-O-methyl modified nucleoside
  modified_base 8: mod_base = OTHER; note = 2'-fluoro-modified nucleoside
  modified_base 9: mod_base = OTHER; note = 2'-fluoro-modified nucleoside
  modified_base 10: mod_base = OTHER; note = 2'-O-methyl modified nucleoside
  modified_base 11: mod_base = OTHER; note = 2'-fluoro-modified nucleoside
  modified_base 12: mod_base = OTHER; note = 2'-O-methyl modified nucleoside
  modified_base 13: mod_base = OTHER; note = 2'-O-methyl modified nucleoside
  modified_base 14: mod_base = OTHER; note = 2'-O-methyl modified nucleoside
  modified_base 15: mod_base = OTHER; note = 2'-O-methyl modified nucleoside
  modified_base 16: mod_base = OTHER; note = 2'-O-methyl modified nucleoside
  modified_base 17: mod_base = OTHER; note = 2'-O-methyl modified nucleoside
  modified_base 18: mod_base = OTHER; note = 2'-O-methyl modified nucleoside
  modified_base 19: mod_base = OTHER; note = 2'-O-methyl modified nucleoside with phosphorothioate linkage
  modified_base 20: mod_base = OTHER; note = 2'-O-methyl modified nucleoside with phosphorothioate linkage
  modified_base 21: mod_base = OTHER; note = 2'-O-methyl modified nucleoside
atagatgtcatacattcaatt

SEQ ID NO: 4945 - RNA, 21 nt, synthetic construct
  source 1..21: mol_type = other RNA
  modified_base 1: mod_base = OTHER; note = 2'-O-methyl modified nucleoside
  modified_base 2: mod_base = OTHER; note = 2'-O-methyl modified nucleoside
  modified_base 3: mod_base = OTHER; note = 2'-O-methyl modified nucleoside
  modified_base 4: mod_base = OTHER; note = 2'-O-methyl modified nucleoside
  modified_base 5: mod_base = OTHER; note = 2'-O-methyl modified nucleoside
  modified_base 6: mod_base = OTHER; note = 2'-fluoro-modified nucleoside
  modified_base 7: mod_base = OTHER; note = 2'-O-methyl modified nucleoside
  modified_base 8: mod_base = OTHER; note = 2'-O-methyl modified nucleoside
  modified_base 9: mod_base = OTHER; note = 2'-fluoro-modified nucleoside
  modified_base 10: mod_base = OTHER; note = 2'-O-methyl modified nucleoside
  modified_base 11: mod_base = OTHER; note = 2'-fluoro-modified nucleoside
  modified_base 12: mod_base = OTHER; note = 2'-O-methyl modified nucleoside
  modified_base 13: mod_base = OTHER; note = 2'-O-methyl modified nucleoside
  modified_base 14: mod_base = OTHER; note = 2'-O-methyl modified nucleoside
  modified_base 15: mod_base = OTHER; note = 2'-O-methyl modified nucleoside
  modified_base 16: mod_base = OTHER; note = 2'-O-methyl modified nucleoside
  modified_base 17: mod_base = OTHER; note = 2'-O-methyl modified nucleoside
  modified_base 18: mod_base = OTHER; note = 2'-O-methyl modified nucleoside
  modified_base 19: mod_base = OTHER; note = 2'-O-methyl modified nucleoside with phosphorothioate linkage
  modified_base 20: mod_base = OTHER; note = 2'-O-methyl modified nucleoside with phosphorothioate linkage
  modified_base 21: mod_base = OTHER; note = 2'-O-methyl modified nucleoside
atagatgtcatacattcaatt

SEQ ID NO: 4946 - RNA, 21 nt, synthetic construct
  source 1..21: mol_type = other RNA
  modified_base 1: mod_base = OTHER; note = 2'-O-methyl modified nucleoside
  modified_base 2: mod_base = OTHER; note = 2'-O-methyl modified nucleoside
  modified_base 3: mod_base = OTHER; note = 2'-O-methyl modified nucleoside
  modified_base 4: mod_base = OTHER; note = 2'-O-methyl modified nucleoside
  modified_base 5: mod_base = OTHER; note = 2'-O-methyl modified nucleoside
  modified_base 6: mod_base = OTHER; note = 2'-fluoro-modified nucleoside
  modified_base 7: mod_base = OTHER; note = 2'-O-methyl modified nucleoside
  modified_base 8: mod_base = OTHER; note = 2'-fluoro-modified nucleoside
  modified_base 9: mod_base = OTHER; note = 2'-fluoro-modified nucleoside
  modified_base 10: mod_base = OTHER; note = 2'-O-methyl modified nucleoside
  modified_base 11: mod_base = OTHER; note = 2'-O-methyl modified nucleoside
  modified_base 12: mod_base = OTHER; note = 2'-O-methyl modified nucleoside
  modified_base 13: mod_base = OTHER; note = 2'-O-methyl modified nucleoside
  modified_base 14: mod_base = OTHER; note = 2'-O-methyl modified nucleoside
  modified_base 15: mod_base = OTHER; note = 2'-O-methyl modified nucleoside
  modified_base 16: mod_base = OTHER; note = 2'-O-methyl modified nucleoside
  modified_base 17: mod_base = OTHER; note = 2'-O-methyl modified nucleoside
  modified_base 18: mod_base = OTHER; note = 2'-O-methyl modified nucleoside
  modified_base 19: mod_base = OTHER; note = 2'-O-methyl modified nucleoside with phosphorothioate linkage
  modified_base 20: mod_base = OTHER; note = 2'-O-methyl modified nucleoside with phosphorothioate linkage
  modified_base 21: mod_base = OTHER; note = 2'-O-methyl modified nucleoside
atagatgtcatacattcaatt

SEQ ID NO: 4947 - RNA, 21 nt, synthetic construct
  source 1..21: mol_type = other RNA
  modified_base 1: mod_base = OTHER; note = 2'-O-methyl modified nucleoside
  modified_base 2: mod_base = OTHER; note = 2'-O-methyl modified nucleoside
  modified_base 3: mod_base = OTHER; note = 2'-O-methyl modified nucleoside
  modified_base 4: mod_base = OTHER; note = 2'-O-methyl modified nucleoside
  modified_base 5: mod_base = OTHER; note = 2'-O-methyl modified nucleoside
  modified_base 6: mod_base = OTHER; note = 2'-fluoro-modified nucleoside
  modified_base 7: mod_base = OTHER; note = 2'-O-methyl modified nucleoside
  modified_base 8: mod_base = OTHER; note = 2'-fluoro-modified nucleoside
  modified_base 9: mod_base = OTHER; note = 2'-fluoro-modified nucleoside
  modified_base 10: mod_base = OTHER; note = 2'-O-methyl modified nucleoside
  modified_base 11: mod_base = OTHER; note = 2'-fluoro-modified nucleoside
  modified_base 12: mod_base = OTHER; note = 2'-O-methyl modified nucleoside
  modified_base 13: mod_base = OTHER; note = 2'-O-methyl modified nucleoside
  modified_base 14: mod_base = OTHER; note = 2'-O-methyl modified nucleoside
  modified_base 15: mod_base = OTHER; note = 2'-O-methyl modified nucleoside
  modified_base 16: mod_base = OTHER; note = 2'-O-methyl modified nucleoside
  modified_base 17: mod_base = OTHER; note = 2'-O-methyl modified nucleoside
  modified_base 18: mod_base = OTHER; note = 2'-O-methyl modified nucleoside
  modified_base 19: mod_base = OTHER; note = 2'-O-methyl modified nucleoside with phosphorothioate linkage
  modified_base 20: mod_base = OTHER; note = 2'-O-methyl modified nucleoside with phosphorothioate linkage
  modified_base 21: mod_base = OTHER; note = 2'-O-methyl modified nucleoside
atagatgtcatacattcaatt

SEQ ID NO: 4948 - RNA, 21 nt, synthetic construct
  source 1..21: mol_type = other RNA
  modified_base 1: mod_base = OTHER; note = 2'-O-methyl modified nucleoside
  modified_base 2: mod_base = OTHER; note = 2'-O-methyl modified nucleoside
  modified_base 3: mod_base = OTHER; note = 2'-O-methyl modified nucleoside
  modified_base 4: mod_base = OTHER; note = 2'-O-methyl modified nucleoside
  modified_base 5: mod_base = OTHER; note = 2'-O-methyl modified nucleoside
  modified_base 6: mod_base = OTHER; note = 2'-O-methyl modified nucleoside
  modified_base 7: mod_base = OTHER; note = 2'-O-methyl modified nucleoside
  modified_base 8: mod_base = OTHER; note = 2'-fluoro-modified nucleoside
  modified_base 9: mod_base = OTHER; note = 2'-fluoro-modified nucleoside
  modified_base 10: mod_base = OTHER; note = 2'-O-methyl modified nucleoside
  modified_base 11: mod_base = OTHER; note = 2'-O-methyl modified nucleoside
  modified_base 12: mod_base = OTHER; note = 2'-O-methyl modified nucleoside
  modified_base 13: mod_base = OTHER; note = 2'-O-methyl modified nucleoside
  modified_base 14: mod_base = OTHER; note = 2'-O-methyl modified nucleoside
  modified_base 15: mod_base = OTHER; note = 2'-O-methyl modified nucleoside
  modified_base 16: mod_base = OTHER; note = 2'-O-methyl modified nucleoside
  modified_base 17: mod_base = OTHER; note = 2'-O-methyl modified nucleoside
  modified_base 18: mod_base = OTHER; note = 2'-O-methyl modified nucleoside
  modified_base 19: mod_base = OTHER; note = 2'-O-methyl modified nucleoside with phosphorothioate linkage
  modified_base 20: mod_base = OTHER; note = 2'-O-methyl modified nucleoside with phosphorothioate linkage
  modified_base 21: mod_base = OTHER; note = 2'-O-methyl modified nucleoside
agttttcaactcattcggatt

SEQ ID NO: 4949 - RNA, 21 nt, synthetic construct
  source 1..21: mol_type = other RNA
  modified_base 1: mod_base = OTHER; note = 2'-O-methyl modified nucleoside
  modified_base 2: mod_base = OTHER; note = 2'-O-methyl modified nucleoside
  modified_base 3: mod_base = OTHER; note = 2'-O-methyl modified nucleoside
  modified_base 4: mod_base = OTHER; note = 2'-O-methyl modified nucleoside
  modified_base 5: mod_base = OTHER; note = 2'-fluoro-modified nucleoside
  modified_base 6: mod_base = OTHER; note = 2'-O-methyl modified nucleoside
  modified_base 7: mod_base = OTHER; note = 2'-O-methyl modified nucleoside
  modified_base 8: mod_base = OTHER; note = 2'-O-methyl modified nucleoside
  modified_base 9: mod_base = OTHER; note = 2'-fluoro-modified nucleoside
  modified_base 10: mod_base = OTHER; note = 2'-O-methyl modified nucleoside
  modified_base 11: mod_base = OTHER; note = 2'-O-methyl modified nucleoside
  modified_base 12: mod_base = OTHER; note = 2'-O-methyl modified nucleoside
  modified_base 13: mod_base = OTHER; note = 2'-O-methyl modified nucleoside
  modified_base 14: mod_base = OTHER; note = 2'-O-methyl modified nucleoside
  modified_base 15: mod_base = OTHER; note = 2'-O-methyl modified nucleoside
  modified_base 16: mod_base = OTHER; note = 2'-O-methyl modified nucleoside
  modified_base 17: mod_base = OTHER; note = 2'-O-methyl modified nucleoside
  modified_base 18: mod_base = OTHER; note = 2'-O-methyl modified nucleoside
  modified_base 19: mod_base = OTHER; note = 2'-O-methyl modified nucleoside with phosphorothioate linkage
  modified_base 20: mod_base = OTHER; note = 2'-O-methyl modified nucleoside with phosphorothioate linkage
  modified_base 21: mod_base = OTHER; note = 2'-O-methyl modified nucleoside
ttcaactcattcggtatcatt

SEQ ID NO: 4950 - RNA, 21 nt, synthetic construct
  source 1..21: mol_type = other RNA
  modified_base 1: mod_base = OTHER; note = 2'-O-methyl modified nucleoside
  modified_base 2: mod_base = OTHER; note = 2'-O-methyl modified nucleoside
  modified_base 3: mod_base = OTHER; note = 2'-O-methyl modified nucleoside
  modified_base 4: mod_base = OTHER; note = 2'-O-methyl modified nucleoside
  modified_base 5: mod_base = OTHER; note = 2'-O-methyl modified nucleoside
  modified_base 6: mod_base = OTHER; note = 2'-fluoro-modified nucleoside
  modified_base 7: mod_base = OTHER; note = 2'-O-methyl modified nucleoside
  modified_base 8: mod_base = OTHER; note = 2'-O-methyl modified nucleoside
  modified_base 9: mod_base = OTHER; note = 2'-fluoro-modified nucleoside
  modified_base 10: mod_base = OTHER; note = 2'-O-methyl modified nucleoside
  modified_base 11: mod_base = OTHER; note = 2'-fluoro-modified nucleoside
  modified_base 12: mod_base = OTHER; note = 2'-O-methyl modified nucleoside
  modified_base 13: mod_base = OTHER; note = 2'-O-methyl modified nucleoside
  modified_base 14: mod_base = OTHER; note = 2'-O-methyl modified nucleoside
  modified_base 15: mod_base = OTHER; note = 2'-O-methyl modified nucleoside
  modified_base 16: mod_base = OTHER; note = 2'-O-methyl modified nucleoside
  modified_base 17: mod_base = OTHER; note = 2'-O-methyl modified nucleoside
  modified_base 18: mod_base = OTHER; note = 2'-O-methyl modified nucleoside
  modified_base 19: mod_base = OTHER; note = 2'-O-methyl modified nucleoside with phosphorothioate linkage
  modified_base 20: mod_base = OTHER; note = 2'-O-methyl modified nucleoside with phosphorothioate linkage
  modified_base 21: mod_base = OTHER; note = 2'-O-methyl modified nucleoside
tcattcggtatccttatcatt

SEQ ID NO: 4951 - RNA, 21 nt, synthetic construct
  source 1..21: mol_type = other RNA
  modified_base 1: mod_base = OTHER; note = 2'-O-methyl modified nucleoside
  modified_base 2: mod_base = OTHER; note = 2'-O-methyl modified nucleoside
  modified_base 3: mod_base = OTHER; note = 2'-O-methyl modified nucleoside
  modified_base 4: mod_base = OTHER; note = 2'-O-methyl modified nucleoside
  modified_base 5: mod_base = OTHER; note = 2'-fluoro-modified nucleoside
  modified_base 6: mod_base = OTHER; note = 2'-O-methyl modified nucleoside
  modified_base 7: mod_base = OTHER; note = 2'-O-methyl modified nucleoside
  modified_base 8: mod_base = OTHER; note = 2'-O-methyl modified nucleoside
  modified_base 9: mod_base = OTHER; note = 2'-fluoro-modified nucleoside
  modified_base 10: mod_base = OTHER; note = 2'-O-methyl modified nucleoside
  modified_base 11: mod_base = OTHER; note = 2'-fluoro-modified nucleoside
  modified_base 12: mod_base = OTHER; note = 2'-O-methyl modified nucleoside
  modified_base 13: mod_base = OTHER; note = 2'-O-methyl modified nucleoside
  modified_base 14: mod_base = OTHER; note = 2'-O-methyl modified nucleoside
  modified_base 15: mod_base = OTHER; note = 2'-O-methyl modified nucleoside
  modified_base 16: mod_base = OTHER; note = 2'-O-methyl modified nucleoside
  modified_base 17: mod_base = OTHER; note = 2'-O-methyl modified nucleoside
  modified_base 18: mod_base = OTHER; note = 2'-O-methyl modified nucleoside
  modified_base 19: mod_base = OTHER; note = 2'-O-methyl modified nucleoside with phosphorothioate linkage
  modified_base 20: mod_base = OTHER; note = 2'-O-methyl modified nucleoside with phosphorothioate linkage
  modified_base 21: mod_base = OTHER; note = 2'-O-methyl modified nucleoside
tcattcggtatccttatcatt

SEQ ID NO: 4952 - RNA, 21 nt, synthetic construct
  source 1..21: mol_type = other RNA
  modified_base 1: mod_base = OTHER; note = 2'-O-methyl modified nucleoside
  modified_base 2: mod_base = OTHER; note = 2'-O-methyl modified nucleoside
  modified_base 3: mod_base = OTHER; note = 2'-O-methyl modified nucleoside
  modified_base 4: mod_base = OTHER; note = 2'-O-methyl modified nucleoside
  modified_base 5: mod_base = OTHER; note = 2'-fluoro-modified nucleoside
  modified_base 6: mod_base = OTHER; note = 2'-fluoro-modified nucleoside
  modified_base 7: mod_base = OTHER; note = 2'-O-methyl modified nucleoside
  modified_base 8: mod_base = OTHER; note = 2'-O-methyl modified nucleoside
  modified_base 9: mod_base = OTHER; note = 2'-fluoro-modified nucleoside
  modified_base 10: mod_base = OTHER; note = 2'-O-methyl modified nucleoside
  modified_base 11: mod_base = OTHER; note = 2'-O-methyl modified nucleoside
  modified_base 12: mod_base = OTHER; note = 2'-O-methyl modified nucleoside
  modified_base 13: mod_base = OTHER; note = 2'-O-methyl modified nucleoside
  modified_base 14: mod_base = OTHER; note = 2'-O-methyl modified nucleoside
  modified_base 15: mod_base = OTHER; note = 2'-O-methyl modified nucleoside
  modified_base 16: mod_base = OTHER; note = 2'-O-methyl modified nucleoside
  modified_base 17: mod_base = OTHER; note = 2'-O-methyl modified nucleoside
  modified_base 18: mod_base = OTHER; note = 2'-O-methyl modified nucleoside
  modified_base 19: mod_base = OTHER; note = 2'-O-methyl modified nucleoside with phosphorothioate linkage
  modified_base 20: mod_base = OTHER; note = 2'-O-methyl modified nucleoside with phosphorothioate linkage
  modified_base 21: mod_base = OTHER; note = 2'-O-methyl modified nucleoside
tcattcggtatccttatcatt

SEQ ID NO: 4953 - RNA, 21 nt, synthetic construct
  source 1..21: mol_type = other RNA
  modified_base 1: mod_base = OTHER; note = 2'-O-methyl modified nucleoside
  modified_base 2: mod_base = OTHER; note = 2'-O-methyl modified nucleoside
  modified_base 3: mod_base = OTHER; note = 2'-O-methyl modified nucleoside
  modified_base 4: mod_base = OTHER; note = 2'-O-methyl modified nucleoside
  modified_base 5: mod_base = OTHER; note = 2'-fluoro-modified nucleoside
  modified_base 6: mod_base = OTHER; note = 2'-fluoro-modified nucleoside
  modified_base 7: mod_base = OTHER; note = 2'-O-methyl modified nucleoside
  modified_base 8: mod_base = OTHER; note = 2'-O-methyl modified nucleoside
  modified_base 9: mod_base = OTHER; note = 2'-fluoro-modified nucleoside
  modified_base 10: mod_base = OTHER; note = 2'-O-methyl modified nucleoside
  modified_base 11: mod_base = OTHER; note = 2'-fluoro-modified nucleoside
  modified_base 12: mod_base = OTHER; note = 2'-O-methyl modified nucleoside
  modified_base 13: mod_base = OTHER; note = 2'-O-methyl modified nucleoside
  modified_base 14: mod_base = OTHER; note = 2'-O-methyl modified nucleoside
  modified_base 15: mod_base = OTHER; note = 2'-O-methyl modified nucleoside
  modified_base 16: mod_base = OTHER; note = 2'-O-methyl modified nucleoside
  modified_base 17: mod_base = OTHER; note = 2'-O-methyl modified nucleoside
  modified_base 18: mod_base = OTHER; note = 2'-O-methyl modified nucleoside
  modified_base 19: mod_base = OTHER; note = 2'-O-methyl modified nucleoside with phosphorothioate linkage
  modified_base 20: mod_base = OTHER; note = 2'-O-methyl modified nucleoside with phosphorothioate linkage
  modified_base 21: mod_base = OTHER; note = 2'-O-methyl modified nucleoside
tcattcggtatccttatcatt

SEQ ID NO: 4954 - RNA, 21 nt, synthetic construct
  source 1..21: mol_type = other RNA
  modified_base 1: mod_base = OTHER; note = 2'-O-methyl modified nucleoside
  modified_base 2: mod_base = OTHER; note = 2'-O-methyl modified nucleoside
  modified_base 3: mod_base = OTHER; note = 2'-O-methyl modified nucleoside
  modified_base 4: mod_base = OTHER; note = 2'-O-methyl modified nucleoside
  modified_base 5: mod_base = OTHER; note = 2'-O-methyl modified nucleoside
  modified_base 6: mod_base = OTHER; note = 2'-O-methyl modified nucleoside
  modified_base 7: mod_base = OTHER; note = 2'-O-methyl modified nucleoside
  modified_base 8: mod_base = OTHER; note = 2'-fluoro-modified nucleoside
  modified_base 9: mod_base = OTHER; note = 2'-fluoro-modified nucleoside
  modified_base 10: mod_base = OTHER; note = 2'-O-methyl modified nucleoside
  modified_base 11: mod_base = OTHER; note = 2'-fluoro-modified nucleoside
  modified_base 12: mod_base = OTHER; note = 2'-O-methyl modified nucleoside
  modified_base 13: mod_base = OTHER; note = 2'-O-methyl modified nucleoside
  modified_base 14: mod_base = OTHER; note = 2'-O-methyl modified nucleoside
  modified_base 15: mod_base = OTHER; note = 2'-O-methyl modified nucleoside
  modified_base 16: mod_base = OTHER; note = 2'-O-methyl modified nucleoside
  modified_base 17: mod_base = OTHER; note = 2'-O-methyl modified nucleoside
  modified_base 18: mod_base = OTHER; note = 2'-O-methyl modified nucleoside
  modified_base 19: mod_base = OTHER; note = 2'-O-methyl modified nucleoside with phosphorothioate linkage
  modified_base 20: mod_base = OTHER; note = 2'-O-methyl modified nucleoside with phosphorothioate linkage
  modified_base 21: mod_base = OTHER; note = 2'-O-methyl modified nucleoside
tcggtatccttatcagttatt

SEQ ID NO: 4955 - RNA, 21 nt, synthetic construct
  source 1..21: mol_type = other RNA
  modified_base 1: mod_base = OTHER; note = 2'-O-methyl modified nucleoside
  modified_base 2: mod_base = OTHER; note = 2'-O-methyl modified nucleoside
  modified_base 3: mod_base = OTHER; note = 2'-O-methyl modified nucleoside
  modified_base 4: mod_base = OTHER; note = 2'-O-methyl modified nucleoside
  modified_base 5: mod_base = OTHER; note = 2'-O-methyl modified nucleoside
  modified_base 6: mod_base = OTHER; note = 2'-O-methyl modified nucleoside
  modified_base 7: mod_base = OTHER; note = 2'-O-methyl modified nucleoside
  modified_base 8: mod_base = OTHER; note = 2'-fluoro-modified nucleoside
  modified_base 9: mod_base = OTHER; note = 2'-fluoro-modified nucleoside
  modified_base 10: mod_base = OTHER; note = 2'-fluoro-modified nucleoside
  modified_base 11: mod_base = OTHER; note = 2'-fluoro-modified nucleoside
  modified_base 12: mod_base = OTHER; note = 2'-O-methyl modified nucleoside
  modified_base 13: mod_base = OTHER; note = 2'-O-methyl modified nucleoside
  modified_base 14: mod_base = OTHER; note = 2'-O-methyl modified nucleoside
  modified_base 15: mod_base = OTHER; note = 2'-O-methyl modified nucleoside
  modified_base 16: mod_base = OTHER; note = 2'-O-methyl modified nucleoside
  modified_base 17: mod_base = OTHER; note = 2'-O-methyl modified nucleoside
  modified_base 18: mod_base = OTHER; note = 2'-O-methyl modified nucleoside
  modified_base 19: mod_base = OTHER; note = 2'-O-methyl modified nucleoside with phosphorothioate linkage
  modified_base 20: mod_base = OTHER; note = 2'-O-methyl modified nucleoside with phosphorothioate linkage
  modified_base 21: mod_base = OTHER; note = 2'-O-methyl modified nucleoside
tcggtatccttatcagttatt

SEQ ID NO: 4956 - RNA, 21 nt, synthetic construct
  source 1..21: mol_type = other RNA
  modified_base 1: mod_base = OTHER; note = 2'-O-methyl modified nucleoside
  modified_base 2: mod_base = OTHER; note = 2'-O-methyl modified nucleoside
  modified_base 3: mod_base = OTHER; note = 2'-O-methyl modified nucleoside
  modified_base 4: mod_base = OTHER; note = 2'-O-methyl modified nucleoside
  modified_base 5: mod_base = OTHER; note = 2'-O-methyl modified nucleoside
  modified_base 6: mod_base = OTHER; note = 2'-O-methyl modified nucleoside
  modified_base 7: mod_base = OTHER; note = 2'-fluoro-modified nucleoside
  modified_base 8: mod_base = OTHER; note = 2'-O-methyl modified nucleoside
  modified_base 9: mod_base = OTHER; note = 2'-fluoro-modified nucleoside
  modified_base 10: mod_base = OTHER; note = 2'-O-methyl modified nucleoside
  modified_base 11: mod_base = OTHER; note = 2'-fluoro-modified nucleoside
  modified_base 12: mod_base = OTHER; note = 2'-O-methyl modified nucleoside
  modified_base 13: mod_base = OTHER; note = 2'-O-methyl modified nucleoside
  modified_base 14: mod_base = OTHER; note = 2'-O-methyl modified nucleoside
  modified_base 15: mod_base = OTHER; note = 2'-O-methyl modified nucleoside
  modified_base 16: mod_base = OTHER; note = 2'-O-methyl modified nucleoside
  modified_base 17: mod_base = OTHER; note = 2'-O-methyl modified nucleoside
  modified_base 18: mod_base = OTHER; note = 2'-O-methyl modified nucleoside
  modified_base 19: mod_base = OTHER; note = 2'-O-methyl modified nucleoside with phosphorothioate linkage
  modified_base 20: mod_base = OTHER; note = 2'-O-methyl modified nucleoside with phosphorothioate linkage
  modified_base 21: mod_base = OTHER; note = 2'-O-methyl modified nucleoside
tcggtatccttatcagttatt

SEQ ID NO: 4957 - RNA, 21 nt, synthetic construct
  source 1..21: mol_type = other RNA
  modified_base 1: mod_base = OTHER; note = 2'-O-methyl modified nucleoside
  modified_base 2: mod_base = OTHER; note = 2'-O-methyl modified nucleoside
  modified_base 3: mod_base = OTHER; note = 2'-O-methyl modified nucleoside
  modified_base 4: mod_base = OTHER; note = 2'-O-methyl modified nucleoside
  modified_base 5: mod_base = OTHER; note = 2'-O-methyl modified nucleoside
  modified_base 6: mod_base = OTHER; note = 2'-O-methyl modified nucleoside
  modified_base 7: mod_base = OTHER; note = 2'-fluoro-modified nucleoside
  modified_base 8: mod_base = OTHER; note = 2'-O-methyl modified nucleoside
  modified_base 9: mod_base = OTHER; note = 2'-fluoro-modified nucleoside
  modified_base 10: mod_base = OTHER; note = 2'-fluoro-modified nucleoside
  modified_base 11: mod_base = OTHER; note = 2'-O-methyl modified nucleoside
  modified_base 12: mod_base = OTHER; note = 2'-O-methyl modified nucleoside
  modified_base 13: mod_base = OTHER; note = 2'-O-methyl modified nucleoside
  modified_base 14: mod_base = OTHER; note = 2'-O-methyl modified nucleoside
  modified_base 15: mod_base = OTHER; note = 2'-O-methyl modified nucleoside
  modified_base 16: mod_base = OTHER; note = 2'-O-methyl modified nucleoside
  modified_base 17: mod_base = OTHER; note = 2'-O-methyl modified nucleoside
  modified_base 18: mod_base = OTHER; note = 2'-O-methyl modified nucleoside
  modified_base 19: mod_base = OTHER; note = 2'-O-methyl modified nucleoside with phosphorothioate linkage
  modified_base 20: mod_base = OTHER; note = 2'-O-methyl modified nucleoside with phosphorothioate linkage
  modified_base 21: mod_base = OTHER; note = 2'-O-methyl modified nucleoside
tcggtatccttatcagttatt

SEQ ID NO: 4958 - RNA, 21 nt, synthetic construct
  source 1..21: mol_type = other RNA
  modified_base 1: mod_base = OTHER; note = 2'-O-methyl modified nucleoside
  modified_base 2: mod_base = OTHER; note = 2'-O-methyl modified nucleoside
  modified_base 3: mod_base = OTHER; note = 2'-O-methyl modified nucleoside
  modified_base 4: mod_base = OTHER; note = 2'-O-methyl modified nucleoside
  modified_base 5: mod_base = OTHER; note = 2'-O-methyl modified nucleoside
  modified_base 6: mod_base = OTHER; note = 2'-O-methyl modified nucleoside
  modified_base 7: mod_base = OTHER; note = 2'-fluoro-modified nucleoside
  modified_base 8: mod_base = OTHER; note = 2'-fluoro-modified nucleoside
  modified_base 9: mod_base = OTHER; note = 2'-fluoro-modified nucleoside
  modified_base 10: mod_base = OTHER; note = 2'-fluoro-modified nucleoside
  modified_base 11: mod_base = OTHER; note = 2'-O-methyl modified nucleoside
  modified_base 12: mod_base = OTHER; note = 2'-O-methyl modified nucleoside
  modified_base 13: mod_base = OTHER; note = 2'-O-methyl modified nucleoside
  modified_base 14: mod_base = OTHER; note = 2'-O-methyl modified nucleoside
  modified_base 15: mod_base = OTHER; note = 2'-O-methyl modified nucleoside
  modified_base 16: mod_base = OTHER; note = 2'-O-methyl modified nucleoside
  modified_base 17: mod_base = OTHER; note = 2'-O-methyl modified nucleoside
  modified_base 18: mod_base = OTHER; note = 2'-O-methyl modified nucleoside
  modified_base 19: mod_base = OTHER; note = 2'-O-methyl modified nucleoside with phosphorothioate linkage
  modified_base 20: mod_base = OTHER; note = 2'-O-methyl modified nucleoside with phosphorothioate linkage
  modified_base 21: mod_base = OTHER; note = 2'-O-methyl modified nucleoside
tcggtatccttatcagttatt

SEQ ID NO: 4959 - RNA, 21 nt, synthetic construct
  source 1..21: mol_type = other RNA
  modified_base 1: mod_base = OTHER; note = 2'-O-methyl modified nucleoside
  modified_base 2: mod_base = OTHER; note = 2'-O-methyl modified nucleoside
  modified_base 3: mod_base = OTHER; note = 2'-O-methyl modified nucleoside
  modified_base 4: mod_base = OTHER; note = 2'-O-methyl modified nucleoside
  modified_base 5: mod_base = OTHER; note = 2'-O-methyl modified nucleoside
  modified_base 6: mod_base = OTHER; note = 2'-O-methyl modified nucleoside
  modified_base 7: mod_base = OTHER; note = 2'-fluoro-modified nucleoside
  modified_base 8: mod_base = OTHER; note = 2'-fluoro-modified nucleoside
  modified_base 9: mod_base = OTHER; note = 2'-fluoro-modified nucleoside
  modified_base 10: mod_base = OTHER; note = 2'-fluoro-modified nucleoside
  modified_base 11: mod_base = OTHER; note = 2'-fluoro-modified nucleoside
  modified_base 12: mod_base = OTHER; note = 2'-O-methyl modified nucleoside
  modified_base 13: mod_base = OTHER; note = 2'-O-methyl modified nucleoside
  modified_base 14: mod_base = OTHER; note = 2'-O-methyl modified nucleoside
  modified_base 15: mod_base = OTHER; note = 2'-O-methyl modified nucleoside
  modified_base 16: mod_base = OTHER; note = 2'-O-methyl modified nucleoside
  modified_base 17: mod_base = OTHER; note = 2'-O-methyl modified nucleoside
  modified_base 18: mod_base = OTHER; note = 2'-O-methyl modified nucleoside
  modified_base 19: mod_base = OTHER; note = 2'-O-methyl modified nucleoside with phosphorothioate linkage
  modified_base 20: mod_base = OTHER; note = 2'-O-methyl modified nucleoside with phosphorothioate linkage
  modified_base 21: mod_base = OTHER; note = 2'-O-methyl modified nucleoside
tcggtatccttatcagttatt

SEQ ID NO: 4960 - RNA, 21 nt, synthetic construct
  source 1..21: mol_type = other RNA
  modified_base 1: mod_base = OTHER; note = 2'-O-methyl modified nucleoside
  modified_base 2: mod_base = OTHER; note = 2'-O-methyl modified nucleoside
  modified_base 3: mod_base = OTHER; note = 2'-O-methyl modified nucleoside
  modified_base 4: mod_base = OTHER; note = 2'-O-methyl modified nucleoside
  modified_base 5: mod_base = OTHER; note = 2'-fluoro-modified nucleoside
  modified_base 6: mod_base = OTHER; note = 2'-O-methyl modified nucleoside
  modified_base 7: mod_base = OTHER; note = 2'-O-methyl modified nucleoside
  modified_base 8: mod_base = OTHER; note = 2'-O-methyl modified nucleoside
  modified_base 9: mod_base = OTHER; note = 2'-fluoro-modified nucleoside
  modified_base 10: mod_base = OTHER; note = 2'-O-methyl modified nucleoside
  modified_base 11: mod_base = OTHER; note = 2'-fluoro-modified nucleoside
  modified_base 12: mod_base = OTHER; note = 2'-O-methyl modified nucleoside
  modified_base 13: mod_base = OTHER; note = 2'-O-methyl modified nucleoside
  modified_base 14: mod_base = OTHER; note = 2'-O-methyl modified nucleoside
  modified_base 15: mod_base = OTHER; note = 2'-O-methyl modified nucleoside
  modified_base 16: mod_base = OTHER; note = 2'-O-methyl modified nucleoside
  modified_base 17: mod_base = OTHER; note = 2'-O-methyl modified nucleoside
  modified_base 18: mod_base = OTHER; note = 2'-O-methyl modified nucleoside
  modified_base 19: mod_base = OTHER; note = 2'-O-methyl modified nucleoside with phosphorothioate linkage
  modified_base 20: mod_base = OTHER; note = 2'-O-methyl modified nucleoside with phosphorothioate linkage
  modified_base 21: mod_base = OTHER; note = 2'-O-methyl modified nucleoside
tcggtatccttatcagttatt

SEQ ID NO: 4961 - RNA, 21 nt, synthetic construct
  source 1..21: mol_type = other RNA
  modified_base 1: mod_base = OTHER; note = 2'-O-methyl modified nucleoside
  modified_base 2: mod_base = OTHER; note = 2'-O-methyl modified nucleoside
  modified_base 3: mod_base = OTHER; note = 2'-O-methyl modified nucleoside
  modified_base 4: mod_base = OTHER; note = 2'-O-methyl modified nucleoside
  modified_base 5: mod_base = OTHER; note = 2'-fluoro-modified nucleoside
  modified_base 6: mod_base = OTHER; note = 2'-O-methyl modified nucleoside
  modified_base 7: mod_base = OTHER; note = 2'-O-methyl modified nucleoside
  modified_base 8: mod_base = OTHER; note = 2'-O-methyl modified nucleoside
  modified_base 9: mod_base = OTHER; note = 2'-fluoro-modified nucleoside
  modified_base 10: mod_base = OTHER; note = 2'-fluoro-modified nucleoside
  modified_base 11: mod_base = OTHER; note = 2'-O-methyl modified nucleoside
  modified_base 12: mod_base = OTHER; note = 2'-O-methyl modified nucleoside
  modified_base 13: mod_base = OTHER; note = 2'-O-methyl modified nucleoside
  modified_base 14: mod_base = OTHER; note = 2'-O-methyl modified nucleoside
  modified_base 15: mod_base = OTHER; note = 2'-O-methyl modified nucleoside
  modified_base 16: mod_base = OTHER; note = 2'-O-methyl modified nucleoside
  modified_base 17: mod_base = OTHER; note = 2'-O-methyl modified nucleoside
  modified_base 18: mod_base = OTHER; note = 2'-O-methyl modified nucleoside
  modified_base 19: mod_base = OTHER; note = 2'-O-methyl modified nucleoside with phosphorothioate linkage
  modified_base 20: mod_base = OTHER; note = 2'-O-methyl modified nucleoside with phosphorothioate linkage
  modified_base 21: mod_base = OTHER; note = 2'-O-methyl modified nucleoside
tcggtatccttatcagttatt

SEQ ID NO: 4962 - RNA, 21 nt, synthetic construct
  source 1..21: mol_type = other RNA
  modified_base 1: mod_base = OTHER; note = 2'-O-methyl modified nucleoside
  modified_base 2: mod_base = OTHER; note = 2'-O-methyl modified nucleoside
  modified_base 3: mod_base = OTHER; note = 2'-O-methyl modified nucleoside
  modified_base 4: mod_base = OTHER; note = 2'-O-methyl modified nucleoside
  modified_base 5: mod_base = OTHER; note = 2'-fluoro-modified nucleoside
  modified_base 6: mod_base = OTHER; note = 2'-O-methyl modified nucleoside
  modified_base 7: mod_base = OTHER; note = 2'-O-methyl modified nucleoside
  modified_base 8: mod_base = OTHER; note = 2'-fluoro-modified nucleoside
  modified_base 9: mod_base = OTHER; note = 2'-fluoro-modified nucleoside
  modified_base 10: mod_base = OTHER; note = 2'-O-methyl modified nucleoside
  modified_base 11: mod_base = OTHER; note = 2'-O-methyl modified nucleoside
  modified_base 12: mod_base = OTHER; note = 2'-O-methyl modified nucleoside
  modified_base 13: mod_base = OTHER; note = 2'-O-methyl modified nucleoside
  modified_base 14: mod_base = OTHER; note = 2'-O-methyl modified nucleoside
  modified_base 15: mod_base = OTHER; note = 2'-O-methyl modified nucleoside
  modified_base 16: mod_base = OTHER; note = 2'-O-methyl modified nucleoside
  modified_base 17: mod_base = OTHER; note = 2'-O-methyl modified nucleoside
  modified_base 18: mod_base = OTHER; note = 2'-O-methyl modified nucleoside
  modified_base 19: mod_base = OTHER; note = 2'-O-methyl modified nucleoside with phosphorothioate linkage
  modified_base 20: mod_base = OTHER; note = 2'-O-methyl modified nucleoside with phosphorothioate linkage
  modified_base 21: mod_base = OTHER; note = 2'-O-methyl modified nucleoside
tcggtatccttatcagttatt

SEQ ID NO: 4963 - RNA, 21 nt, synthetic construct
  source 1..21: mol_type = other RNA
  modified_base 1: mod_base = OTHER; note = 2'-O-methyl modified nucleoside
  modified_base 2: mod_base = OTHER; note = 2'-O-methyl modified nucleoside
  modified_base 3: mod_base = OTHER; note = 2'-O-methyl modified nucleoside
  modified_base 4: mod_base = OTHER; note = 2'-O-methyl modified nucleoside
  modified_base 5: mod_base = OTHER; note = 2'-fluoro-modified nucleoside
  modified_base 6: mod_base = OTHER; note = 2'-O-methyl modified nucleoside
  modified_base 7: mod_base = OTHER; note = 2'-O-methyl modified nucleoside
  modified_base 8: mod_base = OTHER; note = 2'-fluoro-modified nucleoside
  modified_base 9: mod_base = OTHER; note = 2'-fluoro-modified nucleoside
  modified_base 10: mod_base = OTHER; note = 2'-O-methyl modified nucleoside
  modified_base 11: mod_base = OTHER; note = 2'-fluoro-modified nucleoside
  modified_base 12: mod_base = OTHER; note = 2'-O-methyl modified nucleoside
  modified_base 13: mod_base = OTHER; note = 2'-O-methyl modified nucleoside
  modified_base 14: mod_base = OTHER; note = 2'-O-methyl modified nucleoside
  modified_base 15: mod_base = OTHER; note = 2'-O-methyl modified nucleoside
  modified_base 16: mod_base = OTHER; note = 2'-O-methyl modified nucleoside
  modified_base 17: mod_base = OTHER; note = 2'-O-methyl modified nucleoside
  modified_base 18: mod_base = OTHER; note = 2'-O-methyl modified nucleoside
  modified_base 19: mod_base = OTHER; note = 2'-O-methyl modified nucleoside with phosphorothioate linkage
  modified_base 20: mod_base = OTHER; note = 2'-O-methyl modified nucleoside with phosphorothioate linkage
  modified_base 21: mod_base = OTHER; note = 2'-O-methyl modified nucleoside
tcggtatccttatcagttatt

SEQ ID NO: 4964 - RNA, 21 nt, synthetic construct
  source 1..21: mol_type = other RNA
  modified_base 1: mod_base = OTHER; note = 2'-O-methyl modified nucleoside
  modified_base 2: mod_base = OTHER; note = 2'-O-methyl modified nucleoside
  modified_base 3: mod_base = OTHER; note = 2'-O-methyl modified nucleoside
  modified_base 4: mod_base = OTHER; note = 2'-O-methyl modified nucleoside
  modified_base 5: mod_base = OTHER; note = 2'-fluoro-modified nucleoside
  modified_base 6: mod_base = OTHER; note = 2'-O-methyl modified nucleoside
  modified_base 7: mod_base = OTHER; note = 2'-O-methyl modified nucleoside
  modified_base 8: mod_base = OTHER; note = 2'-fluoro-modified nucleoside
  modified_base 9: mod_base = OTHER; note = 2'-fluoro-modified nucleoside
  modified_base 10: mod_base = OTHER; note = 2'-fluoro-modified nucleoside
  modified_base 11: mod_base = OTHER; note = 2'-fluoro-modified nucleoside
  modified_base 12: mod_base = OTHER; note = 2'-O-methyl modified nucleoside
  modified_base 13: mod_base = OTHER; note = 2'-O-methyl modified nucleoside
  modified_base 14: mod_base = OTHER; note = 2'-O-methyl modified nucleoside
  modified_base 15: mod_base = OTHER; note = 2'-O-methyl modified nucleoside
  modified_base 16: mod_base = OTHER; note = 2'-O-methyl modified nucleoside
  modified_base 17: mod_base = OTHER; note = 2'-O-methyl modified nucleoside
  modified_base 18: mod_base = OTHER; note = 2'-O-methyl modified nucleoside
  modified_base 19: mod_base = OTHER; note = 2'-O-methyl modified nucleoside with phosphorothioate linkage
  modified_base 20: mod_base = OTHER; note = 2'-O-methyl modified nucleoside with phosphorothioate linkage
  modified_base 21: mod_base = OTHER; note = 2'-O-methyl modified nucleoside
tcggtatccttatcagttatt

SEQ ID NO: 4965 - RNA, 21 nt, synthetic construct
  source 1..21: mol_type = other RNA
  modified_base 1: mod_base = OTHER; note = 2'-O-methyl modified nucleoside
  modified_base 2: mod_base = OTHER; note = 2'-O-methyl modified nucleoside
  modified_base 3: mod_base = OTHER; note = 2'-O-methyl modified nucleoside
  modified_base 4: mod_base = OTHER; note = 2'-O-methyl modified nucleoside
  modified_base 5: mod_base = OTHER; note = 2'-fluoro-modified nucleoside
  modified_base 6: mod_base = OTHER; note = 2'-O-methyl modified nucleoside
  modified_base 7: mod_base = OTHER; note = 2'-fluoro-modified nucleoside
  modified_base 8: mod_base = OTHER; note = 2'-O-methyl modified nucleoside
  modified_base 9: mod_base = OTHER; note = 2'-fluoro-modified nucleoside
  modified_base 10: mod_base = OTHER; note = 2'-O-methyl modified nucleoside
  modified_base 11: mod_base = OTHER; note = 2'-O-methyl modified nucleoside
  modified_base 12: mod_base = OTHER; note = 2'-O-methyl modified nucleoside
  modified_base 13: mod_base = OTHER; note = 2'-O-methyl modified nucleoside
  modified_base 14: mod_base = OTHER; note = 2'-O-methyl modified nucleoside
  modified_base 15: mod_base = OTHER; note = 2'-O-methyl modified nucleoside
  modified_base 16: mod_base = OTHER; note = 2'-O-methyl modified nucleoside
  modified_base 17: mod_base = OTHER; note = 2'-O-methyl modified nucleoside
  modified_base 18: mod_base = OTHER; note = 2'-O-methyl modified nucleoside
  modified_base 19: mod_base = OTHER; note = 2'-O-methyl modified nucleoside with phosphorothioate linkage
  modified_base 20: mod_base = OTHER; note = 2'-O-methyl modified nucleoside with phosphorothioate linkage
  modified_base 21: mod_base = OTHER; note = 2'-O-methyl modified nucleoside
tcggtatccttatcagttatt

SEQ ID NO: 4966 - RNA, 21 nt, synthetic construct
  source 1..21: mol_type = other RNA
  modified_base 1: mod_base = OTHER; note = 2'-O-methyl modified nucleoside
  modified_base 2: mod_base = OTHER; note = 2'-O-methyl modified nucleoside
  modified_base 3: mod_base = OTHER; note = 2'-O-methyl modified nucleoside
  modified_base 4: mod_base = OTHER; note = 2'-O-methyl modified nucleoside
  modified_base 5: mod_base = OTHER; note = 2'-fluoro-modified nucleoside
  modified_base 6: mod_base = OTHER; note = 2'-O-methyl modified nucleoside
  modified_base 7: mod_base = OTHER; note = 2'-fluoro-modified nucleoside
  modified_base 8: mod_base = OTHER; note = 2'-O-methyl modified nucleoside
  modified_base 9: mod_base = OTHER; note = 2'-fluoro-modified nucleoside
  modified_base 10: mod_base = OTHER; note = 2'-O-methyl modified nucleoside
  modified_base 11: mod_base = OTHER; note = 2'-fluoro-modified nucleoside
  modified_base 12: mod_base = OTHER; note = 2'-O-methyl modified nucleoside
  modified_base 13: mod_base = OTHER; note = 2'-O-methyl modified nucleoside
  modified_base 14: mod_base = OTHER; note = 2'-O-methyl modified nucleoside
  modified_base 15: mod_base = OTHER; note = 2'-O-methyl modified nucleoside
  modified_base 16: mod_base = OTHER; note = 2'-O-methyl modified nucleoside
  modified_base 17: mod_base = OTHER; note = 2'-O-methyl modified nucleoside
  modified_base 18: mod_base = OTHER; note = 2'-O-methyl modified nucleoside
  modified_base 19: mod_base = OTHER; note = 2'-O-methyl modified nucleoside with phosphorothioate linkage
  modified_base 20: mod_base = OTHER; note = 2'-O-methyl modified nucleoside with phosphorothioate linkage
  modified_base 21: mod_base = OTHER; note = 2'-O-methyl modified nucleoside
tcggtatccttatcagttatt

SEQ ID NO: 4967 - RNA, 21 nt, synthetic construct
  source 1..21: mol_type = other RNA
  modified_base 1: mod_base = OTHER; note = 2'-O-methyl modified nucleoside
  modified_base 2: mod_base = OTHER; note = 2'-O-methyl modified nucleoside
  modified_base 3: mod_base = OTHER; note = 2'-O-methyl modified nucleoside
  modified_base 4: mod_base = OTHER; note = 2'-O-methyl modified nucleoside
  modified_base 5: mod_base = OTHER; note = 2'-fluoro-modified nucleoside
  modified_base 6: mod_base = OTHER; note = 2'-O-methyl modified nucleoside
  modified_base 7: mod_base = OTHER; note = 2'-fluoro-modified nucleoside
  modified_base 8: mod_base = OTHER; note = 2'-O-methyl modified nucleoside
  modified_base 9: mod_base = OTHER; note = 2'-fluoro-modified nucleoside
  modified_base 10: mod_base = OTHER; note = 2'-fluoro-modified nucleoside
  modified_base 11: mod_base = OTHER; note = 2'-O-methyl modified nucleoside
  modified_base 12: mod_base = OTHER; note = 2'-O-methyl modified nucleoside
  modified_base 13: mod_base = OTHER; note = 2'-O-methyl modified nucleoside
  modified_base 14: mod_base = OTHER; note = 2'-O-methyl modified nucleoside
  modified_base 15: mod_base = OTHER; note = 2'-O-methyl modified nucleoside
  modified_base 16: mod_base = OTHER; note = 2'-O-methyl modified nucleoside
  modified_base 17: mod_base = OTHER; note = 2'-O-methyl modified nucleoside
  modified_base 18: mod_base = OTHER; note = 2'-O-methyl modified nucleoside
  modified_base 19: mod_base = OTHER; note = 2'-O-methyl modified nucleoside with phosphorothioate linkage
  modified_base 20: mod_base = OTHER; note = 2'-O-methyl modified nucleoside with phosphorothioate linkage
  modified_base 21: mod_base = OTHER; note = 2'-O-methyl modified nucleoside
tcggtatccttatcagttatt

SEQ ID NO: 4968 - RNA, 21 nt, synthetic construct
  source 1..21: mol_type = other RNA
  modified_base 1: mod_base = OTHER; note = 2'-O-methyl modified nucleoside
  modified_base 2: mod_base = OTHER; note = 2'-O-methyl modified nucleoside
  modified_base 3: mod_base = OTHER; note = 2'-O-methyl modified nucleoside
  modified_base 4: mod_base = OTHER; note = 2'-O-methyl modified nucleoside
  modified_base 5: mod_base = OTHER; note = 2'-fluoro-modified nucleoside
  modified_base 6: mod_base = OTHER; note = 2'-O-methyl modified nucleoside
  modified_base 7: mod_base = OTHER; note = 2'-fluoro-modified nucleoside
  modified_base 8: mod_base = OTHER; note = 2'-fluoro-modified nucleoside
  modified_base 9: mod_base = OTHER; note = 2'-fluoro-modified nucleoside
  modified_base 10: mod_base = OTHER; note = 2'-fluoro-modified nucleoside
  modified_base 11: mod_base = OTHER; note = 2'-O-methyl modified nucleoside
  modified_base 12: mod_base = OTHER; note = 2'-O-methyl modified nucleoside
  modified_base 13: mod_base = OTHER; note = 2'-O-methyl modified nucleoside
  modified_base 14: mod_base = OTHER; note = 2'-O-methyl modified nucleoside
  modified_base 15: mod_base = OTHER; note = 2'-O-methyl modified nucleoside
  modified_base 16: mod_base = OTHER; note = 2'-O-methyl modified nucleoside
  modified_base 17: mod_base = OTHER; note = 2'-O-methyl modified nucleoside
  modified_base 18: mod_base = OTHER; note = 2'-O-methyl modified nucleoside
  modified_base 19: mod_base = OTHER; note = 2'-O-methyl modified nucleoside with phosphorothioate linkage
  modified_base 20: mod_base = OTHER; note = 2'-O-methyl modified nucleoside with phosphorothioate linkage
  modified_base 21: mod_base = OTHER; note = 2'-O-methyl modified nucleoside
tcggtatccttatcagttatt

SEQ ID NO: 4969 - RNA, 21 nt, synthetic construct
  source 1..21: mol_type = other RNA
  modified_base 1: mod_base = OTHER; note = 2'-O-methyl modified nucleoside
  modified_base 2: mod_base = OTHER; note = 2'-O-methyl modified nucleoside
  modified_base 3: mod_base = OTHER; note = 2'-O-methyl modified nucleoside
  modified_base 4: mod_base = OTHER; note = 2'-O-methyl modified nucleoside
  modified_base 5: mod_base = OTHER; note = 2'-O-methyl modified nucleoside
  modified_base 6: mod_base = OTHER; note = 2'-fluoro-modified nucleoside
  modified_base 7: mod_base = OTHER; note = 2'-O-methyl modified nucleoside
  modified_base 8: mod_base = OTHER; note = 2'-O-methyl modified nucleoside
  modified_base 9: mod_base = OTHER; note = 2'-fluoro-modified nucleoside
  modified_base 10: mod_base = OTHER; note = 2'-O-methyl modified nucleoside
  modified_base 11: mod_base = OTHER; note = 2'-fluoro-modified nucleoside
  modified_base 12: mod_base = OTHER; note = 2'-O-methyl modified nucleoside
  modified_base 13: mod_base = OTHER; note = 2'-O-methyl modified nucleoside
  modified_base 14: mod_base = OTHER; note = 2'-O-methyl modified nucleoside
  modified_base 15: mod_base = OTHER; note = 2'-O-methyl modified nucleoside
  modified_base 16: mod_base = OTHER; note = 2'-O-methyl modified nucleoside
  modified_base 17: mod_base = OTHER; note = 2'-O-methyl modified nucleoside
  modified_base 18: mod_base = OTHER; note = 2'-O-methyl modified nucleoside
  modified_base 19: mod_base = OTHER; note = 2'-O-methyl modified nucleoside with phosphorothioate linkage
  modified_base 20: mod_base = OTHER; note = 2'-O-methyl modified nucleoside with phosphorothioate linkage
  modified_base 21: mod_base = OTHER; note = 2'-O-methyl modified nucleoside
ttaatcaatgcaataagcatt

SEQ ID NO: 4970 - RNA, 21 nt, synthetic construct
  source 1..21: mol_type = other RNA
  modified_base 1: mod_base = OTHER; note = 2'-O-methyl modified nucleoside
  modified_base 2: mod_base = OTHER; note = 2'-O-methyl modified nucleoside
  modified_base 3: mod_base = OTHER; note = 2'-O-methyl modified nucleoside
  modified_base 4: mod_base = OTHER; note = 2'-O-methyl modified nucleoside
  modified_base 5: mod_base = OTHER; note = 2'-fluoro-modified nucleoside
  modified_base 6: mod_base = OTHER; note = 2'-O-methyl modified nucleoside
  modified_base 7: mod_base = OTHER; note = 2'-O-methyl modified nucleoside
  modified_base 8: mod_base = OTHER; note = 2'-O-methyl modified nucleoside
  modified_base 9: mod_base = OTHER; note = 2'-fluoro-modified nucleoside
  modified_base 10: mod_base = OTHER; note = 2'-O-methyl modified nucleoside
  modified_base 11: mod_base = OTHER; note = 2'-fluoro-modified nucleoside
  modified_base 12: mod_base = OTHER; note = 2'-O-methyl modified nucleoside
  modified_base 13: mod_base = OTHER; note = 2'-O-methyl modified nucleoside
  modified_base 14: mod_base = OTHER; note = 2'-O-methyl modified nucleoside
  modified_base 15: mod_base = OTHER; note = 2'-O-methyl modified nucleoside
  modified_base 16: mod_base = OTHER; note = 2'-O-methyl modified nucleoside
  modified_base 17: mod_base = OTHER; note = 2'-O-methyl modified nucleoside
  modified_base 18: mod_base = OTHER; note = 2'-O-methyl modified nucleoside
  modified_base 19: mod_base = OTHER; note = 2'-O-methyl modified nucleoside with phosphorothioate linkage
  modified_base 20: mod_base = OTHER; note = 2'-O-methyl modified nucleoside with phosphorothioate linkage
  modified_base 21: mod_base = OTHER; note = 2'-O-methyl modified nucleoside
ttaatcaatgcaataagcatt

SEQ ID NO: 4971 - RNA, 21 nt, synthetic construct
  source 1..21: mol_type = other RNA
  modified_base 1: mod_base = OTHER; note = 2'-O-methyl modified nucleoside
  modified_base 2: mod_base = OTHER; note = 2'-O-methyl modified nucleoside
  modified_base 3: mod_base = OTHER; note = 2'-O-methyl modified nucleoside
  modified_base 4: mod_base = OTHER; note = 2'-O-methyl modified nucleoside
  modified_base 5: mod_base = OTHER; note = 2'-fluoro-modified nucleoside
  modified_base 6: mod_base = OTHER; note = 2'-fluoro-modified nucleoside
  modified_base 7: mod_base = OTHER; note = 2'-O-methyl modified nucleoside
  modified_base 8: mod_base = OTHER; note = 2'-O-methyl modified nucleoside
  modified_base 9: mod_base = OTHER; note = 2'-fluoro-modified nucleoside
  modified_base 10: mod_base = OTHER; note = 2'-O-methyl modified nucleoside
  modified_base 11: mod_base = OTHER; note = 2'-O-methyl modified nucleoside
  modified_base 12: mod_base = OTHER; note = 2'-O-methyl modified nucleoside
  modified_base 13: mod_base = OTHER; note = 2'-O-methyl modified nucleoside
  modified_base 14: mod_base = OTHER; note = 2'-O-methyl modified nucleoside
  modified_base 15: mod_base = OTHER; note = 2'-O-methyl modified nucleoside
  modified_base 16: mod_base = OTHER; note = 2'-O-methyl modified nucleoside
  modified_base 17: mod_base = OTHER; note = 2'-O-methyl modified nucleoside
  modified_base 18: mod_base = OTHER; note = 2'-O-methyl modified nucleoside
  modified_base 19: mod_base = OTHER; note = 2'-O-methyl modified nucleoside with phosphorothioate linkage
  modified_base 20: mod_base = OTHER; note = 2'-O-methyl modified nucleoside with phosphorothioate linkage
  modified_base 21: mod_base = OTHER; note = 2'-O-methyl modified nucleoside
ttaatcaatgcaataagcatt

SEQ ID NO: 4972 - RNA, 21 nt, synthetic construct
  source 1..21: mol_type = other RNA
  modified_base 1: mod_base = OTHER; note = 2'-O-methyl modified nucleoside
  modified_base 2: mod_base = OTHER; note = 2'-O-methyl modified nucleoside
  modified_base 3: mod_base = OTHER; note = 2'-O-methyl modified nucleoside
  modified_base 4: mod_base = OTHER; note = 2'-O-methyl modified nucleoside
  modified_base 5: mod_base = OTHER; note = 2'-fluoro-modified nucleoside
  modified_base 6: mod_base = OTHER; note = 2'-fluoro-modified nucleoside
  modified_base 7: mod_base = OTHER; note = 2'-O-methyl modified nucleoside
  modified_base 8: mod_base = OTHER; note = 2'-O-methyl modified nucleoside
  modified_base 9: mod_base = OTHER; note = 2'-fluoro-modified nucleoside
  modified_base 10: mod_base = OTHER; note = 2'-O-methyl modified nucleoside
  modified_base 11: mod_base = OTHER; note = 2'-fluoro-modified nucleoside
  modified_base 12: mod_base = OTHER; note = 2'-O-methyl modified nucleoside
  modified_base 13: mod_base = OTHER; note = 2'-O-methyl modified nucleoside
  modified_base 14: mod_base = OTHER; note = 2'-O-methyl modified nucleoside
  modified_base 15: mod_base = OTHER; note = 2'-O-methyl modified nucleoside
  modified_base 16: mod_base = OTHER; note = 2'-O-methyl modified nucleoside
  modified_base 17: mod_base = OTHER; note = 2'-O-methyl modified nucleoside
  modified_base 18: mod_base = OTHER; note = 2'-O-methyl modified nucleoside
  modified_base 19: mod_base = OTHER; note = 2'-O-methyl modified nucleoside with phosphorothioate linkage
  modified_base 20: mod_base = OTHER; note = 2'-O-methyl modified nucleoside with phosphorothioate linkage
  modified_base 21: mod_base = OTHER; note = 2'-O-methyl modified nucleoside
ttaatcaatgcaataagcatt

SEQ ID NO: 4973 - RNA, 21 nt, synthetic construct
  source 1..21: mol_type = other RNA
  modified_base 1: mod_base = OTHER; note = 2'-O-methyl modified nucleoside
  modified_base 2: mod_base = OTHER; note = 2'-O-methyl modified nucleoside
  modified_base 3: mod_base = OTHER; note = 2'-O-methyl modified nucleoside
  modified_base 4: mod_base = OTHER; note = 2'-O-methyl modified nucleoside
  modified_base 5: mod_base = OTHER; note = 2'-O-methyl modified nucleoside
  modified_base 6: mod_base = OTHER; note = 2'-O-methyl modified nucleoside
  modified_base 7: mod_base = OTHER; note = 2'-fluoro-modified nucleoside
  modified_base 8: mod_base = OTHER; note = 2'-O-methyl modified nucleoside
  modified_base 9: mod_base = OTHER; note = 2'-fluoro-modified nucleoside
  modified_base 10: mod_base = OTHER; note = 2'-fluoro-modified nucleoside
  modified_base 11: mod_base = OTHER; note = 2'-O-methyl modified nucleoside
  modified_base 12: mod_base = OTHER; note = 2'-O-methyl modified nucleoside
  modified_base 13: mod_base = OTHER; note = 2'-O-methyl modified nucleoside
  modified_base 14: mod_base = OTHER; note = 2'-O-methyl modified nucleoside
  modified_base 15: mod_base = OTHER; note = 2'-O-methyl modified nucleoside
  modified_base 16: mod_base = OTHER; note = 2'-O-methyl modified nucleoside
  modified_base 17: mod_base = OTHER; note = 2'-O-methyl modified nucleoside
  modified_base 18: mod_base = OTHER; note = 2'-O-methyl modified nucleoside
  modified_base 19: mod_base = OTHER; note = 2'-O-methyl modified nucleoside with phosphorothioate linkage
  modified_base 20: mod_base = OTHER; note = 2'-O-methyl modified nucleoside with phosphorothioate linkage
  modified_base 21: mod_base = OTHER; note = 2'-O-methyl modified nucleoside
atcaatgcaataagcttgatt

SEQ ID NO: 4974 - RNA, 21 nt, synthetic construct
  source 1..21: mol_type = other RNA
  modified_base 1: mod_base = OTHER; note = 2'-O-methyl modified nucleoside
  modified_base 2: mod_base = OTHER; note = 2'-O-methyl modified nucleoside
  modified_base 3: mod_base = OTHER; note = 2'-O-methyl modified nucleoside
  modified_base 4: mod_base = OTHER; note = 2'-O-methyl modified nucleoside
  modified_base 5: mod_base = OTHER; note = 2'-fluoro-modified nucleoside
  modified_base 6: mod_base = OTHER; note = 2'-O-methyl modified nucleoside
  modified_base 7: mod_base = OTHER; note = 2'-O-methyl modified nucleoside
  modified_base 8: mod_base = OTHER; note = 2'-O-methyl modified nucleoside
  modified_base 9: mod_base = OTHER; note = 2'-fluoro-modified nucleoside
  modified_base 10: mod_base = OTHER; note = 2'-fluoro-modified nucleoside
  modified_base 11: mod_base = OTHER; note = 2'-O-methyl modified nucleoside
  modified_base 12: mod_base = OTHER; note = 2'-O-methyl modified nucleoside
  modified_base 13: mod_base = OTHER; note = 2'-O-methyl modified nucleoside
  modified_base 14: mod_base = OTHER; note = 2'-O-methyl modified nucleoside
  modified_base 15: mod_base = OTHER; note = 2'-O-methyl modified nucleoside
  modified_base 16: mod_base = OTHER; note = 2'-O-methyl modified nucleoside
  modified_base 17: mod_base = OTHER; note = 2'-O-methyl modified nucleoside
  modified_base 18: mod_base = OTHER; note = 2'-O-methyl modified nucleoside
  modified_base 19: mod_base = OTHER; note = 2'-O-methyl modified nucleoside with phosphorothioate linkage
  modified_base 20: mod_base = OTHER; note = 2'-O-methyl modified nucleoside with phosphorothioate linkage
  modified_base 21: mod_base = OTHER; note = 2'-O-methyl modified nucleoside
atcaatgcaataagcttgatt

SEQ ID NO: 4975 - RNA, 21 nt, synthetic construct
  source 1..21: mol_type = other RNA
  modified_base 1: mod_base = OTHER; note = 2'-O-methyl modified nucleoside
  modified_base 2: mod_base = OTHER; note = 2'-O-methyl modified nucleoside
  modified_base 3: mod_base = OTHER; note = 2'-O-methyl modified nucleoside
  modified_base 4: mod_base = OTHER; note = 2'-O-methyl modified nucleoside
  modified_base 5: mod_base = OTHER; note = 2'-fluoro-modified nucleoside
  modified_base 6: mod_base = OTHER; note = 2'-O-methyl modified nucleoside
  modified_base 7: mod_base = OTHER; note = 2'-fluoro-modified nucleoside
  modified_base 8: mod_base = OTHER; note = 2'-O-methyl modified nucleoside
  modified_base 9: mod_base = OTHER; note = 2'-fluoro-modified nucleoside
  modified_base 10: mod_base = OTHER; note = 2'-O-methyl modified nucleoside
  modified_base 11: mod_base = OTHER; note = 2'-O-methyl modified nucleoside
  modified_base 12: mod_base = OTHER; note = 2'-O-methyl modified nucleoside
  modified_base 13: mod_base = OTHER; note = 2'-O-methyl modified nucleoside
  modified_base 14: mod_base = OTHER; note = 2'-O-methyl modified nucleoside
  modified_base 15: mod_base = OTHER; note = 2'-O-methyl modified nucleoside
  modified_base 16: mod_base = OTHER; note = 2'-O-methyl modified nucleoside
  modified_base 17: mod_base = OTHER; note = 2'-O-methyl modified nucleoside
  modified_base 18: mod_base = OTHER; note = 2'-O-methyl modified nucleoside
  modified_base 19: mod_base = OTHER; note = 2'-O-methyl modified nucleoside with phosphorothioate linkage
  modified_base 20: mod_base = OTHER; note = 2'-O-methyl modified nucleoside with phosphorothioate linkage
  modified_base 21: mod_base = OTHER; note = 2'-O-methyl modified nucleoside
atcaatgcaataagcttgatt

SEQ ID NO: 4976 - RNA, 21 nt, synthetic construct
  source 1..21: mol_type = other RNA
  modified_base 1: mod_base = OTHER; note = 2'-O-methyl modified nucleoside
  modified_base 2: mod_base = OTHER; note = 2'-O-methyl modified nucleoside
  modified_base 3: mod_base = OTHER; note = 2'-O-methyl modified nucleoside
  modified_base 4: mod_base = OTHER; note = 2'-O-methyl modified nucleoside
  modified_base 5: mod_base = OTHER; note = 2'-fluoro-modified nucleoside
  modified_base 6: mod_base = OTHER; note = 2'-O-methyl modified nucleoside
  modified_base 7: mod_base = OTHER; note = 2'-fluoro-modified nucleoside
  modified_base 8: mod_base = OTHER; note = 2'-O-methyl modified nucleoside
  modified_base 9: mod_base = OTHER; note = 2'-fluoro-modified nucleoside
  modified_base 10: mod_base = OTHER; note = 2'-fluoro-modified nucleoside
  modified_base 11: mod_base = OTHER; note = 2'-O-methyl modified nucleoside
  modified_base 12: mod_base = OTHER; note = 2'-O-methyl modified nucleoside
  modified_base 13: mod_base = OTHER; note = 2'-O-methyl modified nucleoside
  modified_base 14: mod_base = OTHER; note = 2'-O-methyl modified nucleoside
  modified_base 15: mod_base = OTHER; note = 2'-O-methyl modified nucleoside
  modified_base 16: mod_base = OTHER; note = 2'-O-methyl modified nucleoside
  modified_base 17: mod_base = OTHER; note = 2'-O-methyl modified nucleoside
  modified_base 18: mod_base = OTHER; note = 2'-O-methyl modified nucleoside
  modified_base 19: mod_base = OTHER; note = 2'-O-methyl modified nucleoside with phosphorothioate linkage
  modified_base 20: mod_base = OTHER; note = 2'-O-methyl modified nucleoside with phosphorothioate linkage
  modified_base 21: mod_base = OTHER; note = 2'-O-methyl modified nucleoside
atcaatgcaataagcttgatt

SEQ ID NO: 4977 - RNA, 21 nt, synthetic construct
  source 1..21: mol_type = other RNA
  modified_base 1: mod_base = OTHER; note = 2'-O-methyl modified nucleoside
  modified_base 2: mod_base = OTHER; note = 2'-O-methyl modified nucleoside
  modified_base 3: mod_base = OTHER; note = 2'-O-methyl modified nucleoside
  modified_base 4: mod_base = OTHER; note = 2'-O-methyl modified nucleoside
  modified_base 5: mod_base = OTHER; note = 2'-O-methyl modified nucleoside
  modified_base 6: mod_base = OTHER; note = 2'-O-methyl modified nucleoside
  modified_base 7: mod_base = OTHER; note = 2'-O-methyl modified nucleoside
  modified_base 8: mod_base = OTHER; note = 2'-fluoro-modified nucleoside
  modified_base 9: mod_base = OTHER; note = 2'-fluoro-modified nucleoside
  modified_base 10: mod_base = OTHER; note = 2'-O-methyl modified nucleoside
  modified_base 11: mod_base = OTHER; note = 2'-fluoro-modified nucleoside
  modified_base 12: mod_base = OTHER; note = 2'-O-methyl modified nucleoside
  modified_base 13: mod_base = OTHER; note = 2'-O-methyl modified nucleoside
  modified_base 14: mod_base = OTHER; note = 2'-O-methyl modified nucleoside
  modified_base 15: mod_base = OTHER; note = 2'-O-methyl modified nucleoside
  modified_base 16: mod_base = OTHER; note = 2'-O-methyl modified nucleoside
  modified_base 17: mod_base = OTHER; note = 2'-O-methyl modified nucleoside
  modified_base 18: mod_base = OTHER; note = 2'-O-methyl modified nucleoside
  modified_base 19: mod_base = OTHER; note = 2'-O-methyl modified nucleoside with phosphorothioate linkage
  modified_base 20: mod_base = OTHER; note = 2'-O-methyl modified nucleoside with phosphorothioate linkage
  modified_base 21: mod_base = OTHER; note = 2'-O-methyl modified nucleoside
tcaatgcaataagcttgaatt

SEQ ID NO: 4978 - RNA, 21 nt, synthetic construct
  source 1..21: mol_type = other RNA
  modified_base 1: mod_base = OTHER; note = 2'-O-methyl modified nucleoside
  modified_base 2: mod_base = OTHER; note = 2'-O-methyl modified nucleoside
  modified_base 3: mod_base = OTHER; note = 2'-O-methyl modified nucleoside
  modified_base 4: mod_base = OTHER; note = 2'-O-methyl modified nucleoside
  modified_base 5: mod_base = OTHER; note = 2'-O-methyl modified nucleoside
  modified_base 6: mod_base = OTHER; note = 2'-fluoro-modified nucleoside
  modified_base 7: mod_base = OTHER; note = 2'-O-methyl modified nucleoside
  modified_base 8: mod_base = OTHER; note = 2'-O-methyl modified nucleoside
  modified_base 9: mod_base = OTHER; note = 2'-fluoro-modified nucleoside
  modified_base 10: mod_base = OTHER; note = 2'-O-methyl modified nucleoside
  modified_base 11: mod_base = OTHER; note = 2'-fluoro-modified nucleoside
  modified_base 12: mod_base = OTHER; note = 2'-O-methyl modified nucleoside
  modified_base 13: mod_base = OTHER; note = 2'-O-methyl modified nucleoside
  modified_base 14: mod_base = OTHER; note = 2'-O-methyl modified nucleoside
  modified_base 15: mod_base = OTHER; note = 2'-O-methyl modified nucleoside
  modified_base 16: mod_base = OTHER; note = 2'-O-methyl modified nucleoside
  modified_base 17: mod_base = OTHER; note = 2'-O-methyl modified nucleoside
  modified_base 18: mod_base = OTHER; note = 2'-O-methyl modified nucleoside
  modified_base 19: mod_base = OTHER; note = 2'-O-methyl modified nucleoside with phosphorothioate linkage
  modified_base 20: mod_base = OTHER; note = 2'-O-methyl modified nucleoside with phosphorothioate linkage
  modified_base 21: mod_base = OTHER; note = 2'-O-methyl modified nucleoside
tcaatgcaataagcttgaatt

SEQ ID NO: 4979 - RNA, 21 nt, synthetic construct
  source 1..21: mol_type = other RNA
  modified_base 1: mod_base = OTHER; note = 2'-O-methyl modified nucleoside
  modified_base 2: mod_base = OTHER; note = 2'-O-methyl modified nucleoside
  modified_base 3: mod_base = OTHER; note = 2'-O-methyl modified nucleoside
  modified_base 4: mod_base = OTHER; note = 2'-O-methyl modified nucleoside
  modified_base 5: mod_base = OTHER; note = 2'-O-methyl modified nucleoside
  modified_base 6: mod_base = OTHER; note = 2'-fluoro-modified nucleoside
  modified_base 7: mod_base = OTHER; note = 2'-O-methyl modified nucleoside
  modified_base 8: mod_base = OTHER; note = 2'-fluoro-modified nucleoside
  modified_base 9: mod_base = OTHER; note = 2'-fluoro-modified nucleoside
  modified_base 10: mod_base = OTHER; note = 2'-O-methyl modified nucleoside
  modified_base 11: mod_base = OTHER; note = 2'-O-methyl modified nucleoside
  modified_base 12: mod_base = OTHER; note = 2'-O-methyl modified nucleoside
  modified_base 13: mod_base = OTHER; note = 2'-O-methyl modified nucleoside
  modified_base 14: mod_base = OTHER; note = 2'-O-methyl modified nucleoside
  modified_base 15: mod_base = OTHER; note = 2'-O-methyl modified nucleoside
  modified_base 16: mod_base = OTHER; note = 2'-O-methyl modified nucleoside
  modified_base 17: mod_base = OTHER; note = 2'-O-methyl modified nucleoside
  modified_base 18: mod_base = OTHER; note = 2'-O-methyl modified nucleoside
  modified_base 19: mod_base = OTHER; note = 2'-O-methyl modified nucleoside with phosphorothioate linkage
  modified_base 20: mod_base = OTHER; note = 2'-O-methyl modified nucleoside with phosphorothioate linkage
  modified_base 21: mod_base = OTHER; note = 2'-O-methyl modified nucleoside
tcaatgcaataagcttgaatt

SEQ ID NO: 4980 - RNA, 21 nt, synthetic construct
  source 1..21: mol_type = other RNA
  modified_base 1: mod_base = OTHER; note = 2'-O-methyl modified nucleoside
  modified_base 2: mod_base = OTHER; note = 2'-O-methyl modified nucleoside
  modified_base 3: mod_base = OTHER; note = 2'-O-methyl modified nucleoside
  modified_base 4: mod_base = OTHER; note = 2'-O-methyl modified nucleoside
  modified_base 5: mod_base = OTHER; note = 2'-O-methyl modified nucleoside
  modified_base 6: mod_base = OTHER; note = 2'-fluoro-modified nucleoside
  modified_base 7: mod_base = OTHER; note = 2'-O-methyl modified nucleoside
  modified_base 8: mod_base = OTHER; note = 2'-fluoro-modified nucleoside
  modified_base 9: mod_base = OTHER; note = 2'-fluoro-modified nucleoside
  modified_base 10: mod_base = OTHER; note = 2'-O-methyl modified nucleoside
  modified_base 11: mod_base = OTHER; note = 2'-fluoro-modified nucleoside
  modified_base 12: mod_base = OTHER; note = 2'-O-methyl modified nucleoside
  modified_base 13: mod_base = OTHER; note = 2'-O-methyl modified nucleoside
  modified_base 14: mod_base = OTHER; note = 2'-O-methyl modified nucleoside
  modified_base 15: mod_base = OTHER; note = 2'-O-methyl modified nucleoside
  modified_base 16: mod_base = OTHER; note = 2'-O-methyl modified nucleoside
  modified_base 17: mod_base = OTHER; note = 2'-O-methyl modified nucleoside
  modified_base 18: mod_base = OTHER; note = 2'-O-methyl modified nucleoside
  modified_base 19: mod_base = OTHER; note = 2'-O-methyl modified nucleoside with phosphorothioate linkage
  modified_base 20: mod_base = OTHER; note = 2'-O-methyl modified nucleoside with phosphorothioate linkage
  modified_base 21: mod_base = OTHER; note = 2'-O-methyl modified nucleoside
tcaatgcaataagcttgaatt

SEQ ID NO: 4981 - RNA, 21 nt, synthetic construct
  source 1..21: mol_type = other RNA
  modified_base 1: mod_base = OTHER; note = 2'-O-methyl modified nucleoside
  modified_base 2: mod_base = OTHER; note = 2'-O-methyl modified nucleoside
  modified_base 3: mod_base = OTHER; note = 2'-O-methyl modified nucleoside
  modified_base 4: mod_base = OTHER; note = 2'-O-methyl modified nucleoside
  modified_base 5: mod_base = OTHER; note = 2'-O-methyl modified nucleoside
  modified_base 6: mod_base = OTHER; note = 2'-O-methyl modified nucleoside
  modified_base 7: mod_base = OTHER; note = 2'-fluoro-modified nucleoside
  modified_base 8: mod_base = OTHER; note = 2'-O-methyl modified nucleoside
  modified_base 9: mod_base = OTHER; note = 2'-fluoro-modified nucleoside
  modified_base 10: mod_base = OTHER; note = 2'-O-methyl modified nucleoside
  modified_base 11: mod_base = OTHER; note = 2'-fluoro-modified nucleoside
  modified_base 12: mod_base = OTHER; note = 2'-O-methyl modified nucleoside
  modified_base 13: mod_base = OTHER; note = 2'-O-methyl modified nucleoside
  modified_base 14: mod_base = OTHER; note = 2'-O-methyl modified nucleoside
  modified_base 15: mod_base = OTHER; note = 2'-O-methyl modified nucleoside
  modified_base 16: mod_base = OTHER; note = 2'-O-methyl modified nucleoside
  modified_base 17: mod_base = OTHER; note = 2'-O-methyl modified nucleoside
  modified_base 18: mod_base = OTHER; note = 2'-O-methyl modified nucleoside
  modified_base 19: mod_base = OTHER; note = 2'-O-methyl modified nucleoside with phosphorothioate linkage
  modified_base 20: mod_base = OTHER; note = 2'-O-methyl modified nucleoside with phosphorothioate linkage
  modified_base 21: mod_base = OTHER; note = 2'-O-methyl modified nucleoside
aatgcaataagcttgacgatt

SEQ ID NO: 4982 - RNA, 21 nt, synthetic construct
  source 1..21: mol_type = other RNA
  modified_base 1: mod_base = OTHER; note = 2'-O-methyl modified nucleoside
  modified_base 2: mod_base = OTHER; note = 2'-O-methyl modified nucleoside
  modified_base 3: mod_base = OTHER; note = 2'-O-methyl modified nucleoside
  modified_base 4: mod_base = OTHER; note = 2'-O-methyl modified nucleoside
  modified_base 5: mod_base = OTHER; note = 2'-O-methyl modified nucleoside
  modified_base 6: mod_base = OTHER; note = 2'-O-methyl modified nucleoside
  modified_base 7: mod_base = OTHER; note = 2'-fluoro-modified nucleoside
  modified_base 8: mod_base = OTHER; note = 2'-O-methyl modified nucleoside
  modified_base 9: mod_base = OTHER; note = 2'-fluoro-modified nucleoside
  modified_base 10: mod_base = OTHER; note = 2'-fluoro-modified nucleoside
  modified_base 11: mod_base = OTHER; note = 2'-O-methyl modified nucleoside
  modified_base 12: mod_base = OTHER; note = 2'-O-methyl modified nucleoside
  modified_base 13: mod_base = OTHER; note = 2'-O-methyl modified nucleoside
  modified_base 14: mod_base = OTHER; note = 2'-O-methyl modified nucleoside
  modified_base 15: mod_base = OTHER; note = 2'-O-methyl modified nucleoside
  modified_base 16: mod_base = OTHER; note = 2'-O-methyl modified nucleoside
  modified_base 17: mod_base = OTHER; note = 2'-O-methyl modified nucleoside
  modified_base 18: mod_base = OTHER; note = 2'-O-methyl modified nucleoside
  modified_base 19: mod_base = OTHER; note = 2'-O-methyl modified nucleoside with phosphorothioate linkage
  modified_base 20: mod_base = OTHER; note = 2'-O-methyl modified nucleoside with phosphorothioate linkage
  modified_base 21: mod_base = OTHER; note = 2'-O-methyl modified nucleoside
aatgcaataagcttgacgatt

SEQ ID NO: 4983 - RNA, 21 nt, synthetic construct
  source 1..21: mol_type = other RNA
  modified_base 1: mod_base = OTHER; note = 2'-O-methyl modified nucleoside
  modified_base 2: mod_base = OTHER; note = 2'-O-methyl modified nucleoside
  modified_base 3: mod_base = OTHER; note = 2'-O-methyl modified nucleoside
  modified_base 4: mod_base = OTHER; note = 2'-O-methyl modified nucleoside
  modified_base 5: mod_base = OTHER; note = 2'-O-methyl modified nucleoside
  modified_base 6: mod_base = OTHER; note = 2'-fluoro-modified nucleoside
  modified_base 7: mod_base = OTHER; note = 2'-O-methyl modified nucleoside
  modified_base 8: mod_base = OTHER; note = 2'-O-methyl modified nucleoside
  modified_base 9: mod_base = OTHER; note = 2'-fluoro-modified nucleoside
  modified_base 10: mod_base = OTHER; note = 2'-O-methyl modified nucleoside
  modified_base 11: mod_base = OTHER; note = 2'-fluoro-modified nucleoside
  modified_base 12: mod_base = OTHER; note = 2'-O-methyl modified nucleoside
  modified_base 13: mod_base = OTHER; note = 2'-O-methyl modified nucleoside
  modified_base 14: mod_base = OTHER; note = 2'-O-methyl modified nucleoside
  modified_base 15: mod_base = OTHER; note = 2'-O-methyl modified nucleoside
  modified_base 16: mod_base = OTHER; note = 2'-O-methyl modified nucleoside
  modified_base 17: mod_base = OTHER; note = 2'-O-methyl modified nucleoside
  modified_base 18: mod_base = OTHER; note = 2'-O-methyl modified nucleoside
  modified_base 19: mod_base = OTHER; note = 2'-O-methyl modified nucleoside with phosphorothioate linkage
  modified_base 20: mod_base = OTHER; note = 2'-O-methyl modified nucleoside with phosphorothioate linkage
  modified_base 21: mod_base = OTHER; note = 2'-O-methyl modified nucleoside
aatgcaataagcttgacgatt

SEQ ID NO: 4984 - RNA, 21 nt, synthetic construct
  source 1..21: mol_type = other RNA
  modified_base 1: mod_base = OTHER; note = 2'-O-methyl modified nucleoside
  modified_base 2: mod_base = OTHER; note = 2'-O-methyl modified nucleoside
  modified_base 3: mod_base = OTHER; note = 2'-O-methyl modified nucleoside
  modified_base 4: mod_base = OTHER; note = 2'-O-methyl modified nucleoside
  modified_base 5: mod_base = OTHER; note = 2'-O-methyl modified nucleoside
  modified_base 6: mod_base = OTHER; note = 2'-fluoro-modified nucleoside
  modified_base 7: mod_base = OTHER; note = 2'-O-methyl modified nucleoside
  modified_base 8: mod_base = OTHER; note = 2'-O-methyl modified nucleoside
  modified_base 9: mod_base = OTHER; note = 2'-fluoro-modified nucleoside
  modified_base 10: mod_base = OTHER; note = 2'-fluoro-modified nucleoside
  modified_base 11: mod_base = OTHER; note = 2'-O-methyl modified nucleoside
  modified_base 12: mod_base = OTHER; note = 2'-O-methyl modified nucleoside
  modified_base 13: mod_base = OTHER; note = 2'-O-methyl modified nucleoside
  modified_base 14: mod_base = OTHER; note = 2'-O-methyl modified nucleoside
  modified_base 15: mod_base = OTHER; note = 2'-O-methyl modified nucleoside
  modified_base 16: mod_base = OTHER; note = 2'-O-methyl modified nucleoside
  modified_base 17: mod_base = OTHER; note = 2'-O-methyl modified nucleoside
  modified_base 18: mod_base = OTHER; note = 2'-O-methyl modified nucleoside
  modified_base 19: mod_base = OTHER; note = 2'-O-methyl modified nucleoside with phosphorothioate linkage
  modified_base 20: mod_base = OTHER; note = 2'-O-methyl modified nucleoside with phosphorothioate linkage
  modified_base 21: mod_base = OTHER; note = 2'-O-methyl modified nucleoside
aatgcaataagcttgacgatt

SEQ ID NO: 4985 - RNA, 21 nt, synthetic construct
  source 1..21: mol_type = other RNA
  modified_base 1: mod_base = OTHER; note = 2'-O-methyl modified nucleoside
  modified_base 2: mod_base = OTHER; note = 2'-O-methyl modified nucleoside
  modified_base 3: mod_base = OTHER; note = 2'-O-methyl modified nucleoside
  modified_base 4: mod_base = OTHER; note = 2'-O-methyl modified nucleoside
  modified_base 5: mod_base = OTHER; note = 2'-O-methyl modified nucleoside
  modified_base 6: mod_base = OTHER; note = 2'-fluoro-modified nucleoside
  modified_base 7: mod_base = OTHER; note = 2'-fluoro-modified nucleoside
  modified_base 8: mod_base = OTHER; note = 2'-O-methyl modified nucleoside
  modified_base 9: mod_base = OTHER; note = 2'-fluoro-modified nucleoside
  modified_base 10: mod_base = OTHER; note = 2'-O-methyl modified nucleoside
  modified_base 11: mod_base = OTHER; note = 2'-O-methyl modified nucleoside
  modified_base 12: mod_base = OTHER; note = 2'-O-methyl modified nucleoside
  modified_base 13: mod_base = OTHER; note = 2'-O-methyl modified nucleoside
  modified_base 14: mod_base = OTHER; note = 2'-O-methyl modified nucleoside
  modified_base 15: mod_base = OTHER; note = 2'-O-methyl modified nucleoside
  modified_base 16: mod_base = OTHER; note = 2'-O-methyl modified nucleoside
  modified_base 17: mod_base = OTHER; note = 2'-O-methyl modified nucleoside
  modified_base 18: mod_base = OTHER; note = 2'-O-methyl modified nucleoside
  modified_base 19: mod_base = OTHER; note = 2'-O-methyl modified nucleoside with phosphorothioate linkage
  modified_base 20: mod_base = OTHER; note = 2'-O-methyl modified nucleoside with phosphorothioate linkage
  modified_base 21: mod_base = OTHER; note = 2'-O-methyl modified nucleoside
aatgcaataagcttgacgatt

SEQ ID NO: 4986 - RNA, 21 nt, synthetic construct
  source 1..21: mol_type = other RNA
  modified_base 1: mod_base = OTHER; note = 2'-O-methyl modified nucleoside
  modified_base 2: mod_base = OTHER; note = 2'-O-methyl modified nucleoside
  modified_base 3: mod_base = OTHER; note = 2'-O-methyl modified nucleoside
  modified_base 4: mod_base = OTHER; note = 2'-O-methyl modified nucleoside
  modified_base 5: mod_base = OTHER; note = 2'-O-methyl modified nucleoside
  modified_base 6: mod_base = OTHER; note = 2'-fluoro-modified nucleoside
  modified_base 7: mod_base = OTHER; note = 2'-fluoro-modified nucleoside
  modified_base 8: mod_base = OTHER; note = 2'-O-methyl modified nucleoside
  modified_base 9: mod_base = OTHER; note = 2'-fluoro-modified nucleoside
  modified_base 10: mod_base = OTHER; note = 2'-O-methyl modified nucleoside
  modified_base 11: mod_base = OTHER; note = 2'-fluoro-modified nucleoside
  modified_base 12: mod_base = OTHER; note = 2'-O-methyl modified nucleoside
  modified_base 13: mod_base = OTHER; note = 2'-O-methyl modified nucleoside
  modified_base 14: mod_base = OTHER; note = 2'-O-methyl modified nucleoside
  modified_base 15: mod_base = OTHER; note = 2'-O-methyl modified nucleoside
  modified_base 16: mod_base = OTHER; note = 2'-O-methyl modified nucleoside
  modified_base 17: mod_base = OTHER; note = 2'-O-methyl modified nucleoside
  modified_base 18: mod_base = OTHER; note = 2'-O-methyl modified nucleoside
  modified_base 19: mod_base = OTHER; note = 2'-O-methyl modified nucleoside with phosphorothioate linkage
  modified_base 20: mod_base = OTHER; note = 2'-O-methyl modified nucleoside with phosphorothioate linkage
  modified_base 21: mod_base = OTHER; note = 2'-O-methyl modified nucleoside
aatgcaataagcttgacgatt

SEQ ID NO: 4987 - RNA, 21 nt, synthetic construct
  source 1..21: mol_type = other RNA
  modified_base 1: mod_base = OTHER; note = 2'-O-methyl modified nucleoside
  modified_base 2: mod_base = OTHER; note = 2'-O-methyl modified nucleoside
  modified_base 3: mod_base = OTHER; note = 2'-O-methyl modified nucleoside
  modified_base 4: mod_base = OTHER; note = 2'-O-methyl modified nucleoside
  modified_base 5: mod_base = OTHER; note = 2'-O-methyl modified nucleoside
  modified_base 6: mod_base = OTHER; note = 2'-fluoro-modified nucleoside
  modified_base 7: mod_base = OTHER; note = 2'-fluoro-modified nucleoside
  modified_base 8: mod_base = OTHER; note = 2'-O-methyl modified nucleoside
  modified_base 9: mod_base = OTHER; note = 2'-fluoro-modified nucleoside
  modified_base 10: mod_base = OTHER; note = 2'-fluoro-modified nucleoside
  modified_base 11: mod_base = OTHER; note = 2'-O-methyl modified nucleoside
  modified_base 12: mod_base = OTHER; note = 2'-O-methyl modified nucleoside
  modified_base 13: mod_base = OTHER; note = 2'-O-methyl modified nucleoside
  modified_base 14: mod_base = OTHER; note = 2'-O-methyl modified nucleoside
  modified_base 15: mod_base = OTHER; note = 2'-O-methyl modified nucleoside
  modified_base 16: mod_base = OTHER; note = 2'-O-methyl modified nucleoside
  modified_base 17: mod_base = OTHER; note = 2'-O-methyl modified nucleoside
  modified_base 18: mod_base = OTHER; note = 2'-O-methyl modified nucleoside
  modified_base 19: mod_base = OTHER; note = 2'-O-methyl modified nucleoside with phosphorothioate linkage
  modified_base 20: mod_base = OTHER; note = 2'-O-methyl modified nucleoside with phosphorothioate linkage
  modified_base 21: mod_base = OTHER; note = 2'-O-methyl modified nucleoside
aatgcaataagcttgacgatt

SEQ ID NO: 4988 - RNA, 21 nt, synthetic construct
  source 1..21: mol_type = other RNA
  modified_base 1: mod_base = OTHER; note = 2'-O-methyl modified nucleoside
  modified_base 2: mod_base = OTHER; note = 2'-O-methyl modified nucleoside
  modified_base 3: mod_base = OTHER; note = 2'-O-methyl modified nucleoside
  modified_base 4: mod_base = OTHER; note = 2'-O-methyl modified nucleoside
  modified_base 5: mod_base = OTHER; note = 2'-O-methyl modified nucleoside
  modified_base 6: mod_base = OTHER; note = 2'-O-methyl modified nucleoside
  modified_base 7: mod_base = OTHER; note = 2'-O-methyl modified nucleoside
  modified_base 8: mod_base = OTHER; note = 2'-fluoro-modified nucleoside
  modified_base 9: mod_base = OTHER; note = 2'-fluoro-modified nucleoside
  modified_base 10: mod_base = OTHER; note = 2'-O-methyl modified nucleoside
  modified_base 11: mod_base = OTHER; note = 2'-fluoro-modified nucleoside
  modified_base 12: mod_base = OTHER; note = 2'-O-methyl modified nucleoside
  modified_base 13: mod_base = OTHER; note = 2'-O-methyl modified nucleoside
  modified_base 14: mod_base = OTHER; note = 2'-O-methyl modified nucleoside
  modified_base 15: mod_base = OTHER; note = 2'-O-methyl modified nucleoside
  modified_base 16: mod_base = OTHER; note = 2'-O-methyl modified nucleoside
  modified_base 17: mod_base = OTHER; note = 2'-O-methyl modified nucleoside
  modified_base 18: mod_base = OTHER; note = 2'-O-methyl modified nucleoside
  modified_base 19: mod_base = OTHER; note = 2'-O-methyl modified nucleoside with phosphorothioate linkage
  modified_base 20: mod_base = OTHER; note = 2'-O-methyl modified nucleoside with phosphorothioate linkage
  modified_base 21: mod_base = OTHER; note = 2'-O-methyl modified nucleoside
attcattccgttaccattatt

SEQ ID NO: 4989 - RNA, 21 nt, synthetic construct
  source 1..21: mol_type = other RNA
  modified_base 1: mod_base = OTHER; note = 2'-O-methyl modified nucleoside
  modified_base 2: mod_base = OTHER; note = 2'-O-methyl modified nucleoside
  modified_base 3: mod_base = OTHER; note = 2'-O-methyl modified nucleoside
  modified_base 4: mod_base = OTHER; note = 2'-O-methyl modified nucleoside
  modified_base 5: mod_base = OTHER; note = 2'-O-methyl modified nucleoside
  modified_base 6: mod_base = OTHER; note = 2'-O-methyl modified nucleoside
  modified_base 7: mod_base = OTHER; note = 2'-fluoro-modified nucleoside
  modified_base 8: mod_base = OTHER; note = 2'-O-methyl modified nucleoside
  modified_base 9: mod_base = OTHER; note = 2'-fluoro-modified nucleoside
  modified_base 10: mod_base = OTHER; note = 2'-O-methyl modified nucleoside
  modified_base 11: mod_base = OTHER; note = 2'-fluoro-modified nucleoside
  modified_base 12: mod_base = OTHER; note = 2'-O-methyl modified nucleoside
  modified_base 13: mod_base = OTHER; note = 2'-O-methyl modified nucleoside
  modified_base 14: mod_base = OTHER; note = 2'-O-methyl modified nucleoside
  modified_base 15: mod_base = OTHER; note = 2'-O-methyl modified nucleoside
  modified_base 16: mod_base = OTHER; note = 2'-O-methyl modified nucleoside
  modified_base 17: mod_base = OTHER; note = 2'-O-methyl modified nucleoside
  modified_base 18: mod_base = OTHER; note = 2'-O-methyl modified nucleoside
  modified_base 19: mod_base = OTHER; note = 2'-O-methyl modified nucleoside with phosphorothioate linkage
  modified_base 20: mod_base = OTHER; note = 2'-O-methyl modified nucleoside with phosphorothioate linkage
  modified_base 21: mod_base = OTHER; note = 2'-O-methyl modified nucleoside
attcattccgttaccattatt

SEQ ID NO: 4990 - RNA, 21 nt, synthetic construct
  source 1..21: mol_type = other RNA
  modified_base 1: mod_base = OTHER; note = 2'-O-methyl modified nucleoside
  modified_base 2: mod_base = OTHER; note = 2'-O-methyl modified nucleoside
  modified_base 3: mod_base = OTHER; note = 2'-O-methyl modified nucleoside
  modified_base 4: mod_base = OTHER; note = 2'-O-methyl modified nucleoside
  modified_base 5: mod_base = OTHER; note = 2'-O-methyl modified nucleoside
  modified_base 6: mod_base = OTHER; note = 2'-fluoro-modified nucleoside
  modified_base 7: mod_base = OTHER; note = 2'-O-methyl modified nucleoside
  modified_base 8: mod_base = OTHER; note = 2'-O-methyl modified nucleoside
  modified_base 9: mod_base = OTHER; note = 2'-fluoro-modified nucleoside
  modified_base 10: mod_base = OTHER; note = 2'-O-methyl modified nucleoside
  modified_base 11: mod_base = OTHER; note = 2'-fluoro-modified nucleoside
  modified_base 12: mod_base = OTHER; note = 2'-O-methyl modified nucleoside
  modified_base 13: mod_base = OTHER; note = 2'-O-methyl modified nucleoside
  modified_base 14: mod_base = OTHER; note = 2'-O-methyl modified nucleoside
  modified_base 15: mod_base = OTHER; note = 2'-O-methyl modified nucleoside
  modified_base 16: mod_base = OTHER; note = 2'-O-methyl modified nucleoside
  modified_base 17: mod_base = OTHER; note = 2'-O-methyl modified nucleoside
  modified_base 18: mod_base = OTHER; note = 2'-O-methyl modified nucleoside
  modified_base 19: mod_base = OTHER; note = 2'-O-methyl modified nucleoside with phosphorothioate linkage
  modified_base 20: mod_base = OTHER; note = 2'-O-methyl modified nucleoside with phosphorothioate linkage
  modified_base 21: mod_base = OTHER; note = 2'-O-methyl modified nucleoside
attcattccgttaccattatt

SEQ ID NO: 4991 - RNA, 21 nt, synthetic construct
  source 1..21: mol_type = other RNA
  modified_base 1: mod_base = OTHER; note = 2'-O-methyl modified nucleoside
  modified_base 2: mod_base = OTHER; note = 2'-O-methyl modified nucleoside
  modified_base 3: mod_base = OTHER; note = 2'-O-methyl modified nucleoside
  modified_base 4: mod_base = OTHER; note = 2'-O-methyl modified nucleoside
  modified_base 5: mod_base = OTHER; note = 2'-O-methyl modified nucleoside
  modified_base 6: mod_base = OTHER; note = 2'-fluoro-modified nucleoside
  modified_base 7: mod_base = OTHER; note = 2'-O-methyl modified nucleoside
  modified_base 8: mod_base = OTHER; note = 2'-fluoro-modified nucleoside
  modified_base 9: mod_base = OTHER; note = 2'-fluoro-modified nucleoside
  modified_base 10: mod_base = OTHER; note = 2'-O-methyl modified nucleoside
  modified_base 11: mod_base = OTHER; note = 2'-O-methyl modified nucleoside
  modified_base 12: mod_base = OTHER; note = 2'-O-methyl modified nucleoside
  modified_base 13: mod_base = OTHER; note = 2'-O-methyl modified nucleoside
  modified_base 14: mod_base = OTHER; note = 2'-O-methyl modified nucleoside
  modified_base 15: mod_base = OTHER; note = 2'-O-methyl modified nucleoside
  modified_base 16: mod_base = OTHER; note = 2'-O-methyl modified nucleoside
  modified_base 17: mod_base = OTHER; note = 2'-O-methyl modified nucleoside
  modified_base 18: mod_base = OTHER; note = 2'-O-methyl modified nucleoside
  modified_base 19: mod_base = OTHER; note = 2'-O-methyl modified nucleoside with phosphorothioate linkage
  modified_base 20: mod_base = OTHER; note = 2'-O-methyl modified nucleoside with phosphorothioate linkage
  modified_base 21: mod_base = OTHER; note = 2'-O-methyl modified nucleoside
attcattccgttaccattatt

SEQ ID NO: 4992 - RNA, 21 nt, synthetic construct
  source 1..21: mol_type = other RNA
  modified_base 1: mod_base = OTHER; note = 2'-O-methyl modified nucleoside
  modified_base 2: mod_base = OTHER; note = 2'-O-methyl modified nucleoside
  modified_base 3: mod_base = OTHER; note = 2'-O-methyl modified nucleoside
  modified_base 4: mod_base = OTHER; note = 2'-O-methyl modified nucleoside
  modified_base 5: mod_base = OTHER; note = 2'-O-methyl modified nucleoside
  modified_base 6: mod_base = OTHER; note = 2'-fluoro-modified nucleoside
  modified_base 7: mod_base = OTHER; note = 2'-O-methyl modified nucleoside
  modified_base 8: mod_base = OTHER; note = 2'-fluoro-modified nucleoside
  modified_base 9: mod_base = OTHER; note = 2'-fluoro-modified nucleoside
  modified_base 10: mod_base = OTHER; note = 2'-O-methyl modified nucleoside
  modified_base 11: mod_base = OTHER; note = 2'-fluoro-modified nucleoside
  modified_base 12: mod_base = OTHER; note = 2'-O-methyl modified nucleoside
  modified_base 13: mod_base = OTHER; note = 2'-O-methyl modified nucleoside
  modified_base 14: mod_base = OTHER; note = 2'-O-methyl modified nucleoside
  modified_base 15: mod_base = OTHER; note = 2'-O-methyl modified nucleoside
  modified_base 16: mod_base = OTHER; note = 2'-O-methyl modified nucleoside
  modified_base 17: mod_base = OTHER; note = 2'-O-methyl modified nucleoside
  modified_base 18: mod_base = OTHER; note = 2'-O-methyl modified nucleoside
  modified_base 19: mod_base = OTHER; note = 2'-O-methyl modified nucleoside with phosphorothioate linkage
  modified_base 20: mod_base = OTHER; note = 2'-O-methyl modified nucleoside with phosphorothioate linkage
  modified_base 21: mod_base = OTHER; note = 2'-O-methyl modified nucleoside
attcattccgttaccattatt

SEQ ID NO: 4993 - RNA, 21 nt, synthetic construct
  source 1..21: mol_type = other RNA
  modified_base 1: mod_base = OTHER; note = 2'-O-methyl modified nucleoside
  modified_base 2: mod_base = OTHER; note = 2'-O-methyl modified nucleoside
  modified_base 3: mod_base = OTHER; note = 2'-O-methyl modified nucleoside
  modified_base 4: mod_base = OTHER; note = 2'-O-methyl modified nucleoside
  modified_base 5: mod_base = OTHER; note = 2'-O-methyl modified nucleoside
  modified_base 6: mod_base = OTHER; note = 2'-fluoro-modified nucleoside
  modified_base 7: mod_base = OTHER; note = 2'-fluoro-modified nucleoside
  modified_base 8: mod_base = OTHER; note = 2'-O-methyl modified nucleoside
  modified_base 9: mod_base = OTHER; note = 2'-fluoro-modified nucleoside
  modified_base 10: mod_base = OTHER; note = 2'-O-methyl modified nucleoside
  modified_base 11: mod_base = OTHER; note = 2'-O-methyl modified nucleoside
  modified_base 12: mod_base = OTHER; note = 2'-O-methyl modified nucleoside
  modified_base 13: mod_base = OTHER; note = 2'-O-methyl modified nucleoside
  modified_base 14: mod_base = OTHER; note = 2'-O-methyl modified nucleoside
  modified_base 15: mod_base = OTHER; note = 2'-O-methyl modified nucleoside
  modified_base 16: mod_base = OTHER; note = 2'-O-methyl modified nucleoside
  modified_base 17: mod_base = OTHER; note = 2'-O-methyl modified nucleoside
  modified_base 18: mod_base = OTHER; note = 2'-O-methyl modified nucleoside
  modified_base 19: mod_base = OTHER; note = 2'-O-methyl modified nucleoside with phosphorothioate linkage
  modified_base 20: mod_base = OTHER; note = 2'-O-methyl modified nucleoside with phosphorothioate linkage
  modified_base 21: mod_base = OTHER; note = 2'-O-methyl modified nucleoside
attcattccgttaccattatt

SEQ ID NO: 4994 - RNA, 21 nt, synthetic construct
  source 1..21: mol_type = other RNA
  modified_base 1: mod_base = OTHER; note = 2'-O-methyl modified nucleoside
  modified_base 2: mod_base = OTHER; note = 2'-O-methyl modified nucleoside
  modified_base 3: mod_base = OTHER; note = 2'-O-methyl modified nucleoside
  modified_base 4: mod_base = OTHER; note = 2'-O-methyl modified nucleoside
  modified_base 5: mod_base = OTHER; note = 2'-O-methyl modified nucleoside
  modified_base 6: mod_base = OTHER; note = 2'-fluoro-modified nucleoside
  modified_base 7: mod_base = OTHER; note = 2'-fluoro-modified nucleoside
  modified_base 8: mod_base = OTHER; note = 2'-O-methyl modified nucleoside
  modified_base 9: mod_base = OTHER; note = 2'-fluoro-modified nucleoside
  modified_base 10: mod_base = OTHER; note = 2'-O-methyl modified nucleoside
  modified_base 11: mod_base = OTHER; note = 2'-fluoro-modified nucleoside
  modified_base 12: mod_base = OTHER; note = 2'-O-methyl modified nucleoside
  modified_base 13: mod_base = OTHER; note = 2'-O-methyl modified nucleoside
  modified_base 14: mod_base = OTHER; note = 2'-O-methyl modified nucleoside
  modified_base 15: mod_base = OTHER; note = 2'-O-methyl modified nucleoside
  modified_base 16: mod_base = OTHER; note = 2'-O-methyl modified nucleoside
  modified_base 17: mod_base = OTHER; note = 2'-O-methyl modified nucleoside
  modified_base 18: mod_base = OTHER; note = 2'-O-methyl modified nucleoside
  modified_base 19: mod_base = OTHER; note = 2'-O-methyl modified nucleoside with phosphorothioate linkage
  modified_base 20: mod_base = OTHER; note = 2'-O-methyl modified nucleoside with phosphorothioate linkage
  modified_base 21: mod_base = OTHER; note = 2'-O-methyl modified nucleoside
attcattccgttaccattatt

SEQ ID NO: 4995 - RNA, 21 nt, synthetic construct
  source 1..21: mol_type = other RNA
  modified_base 1: mod_base = OTHER; note = 2'-O-methyl modified nucleoside
  modified_base 2: mod_base = OTHER; note = 2'-O-methyl modified nucleoside
  modified_base 3: mod_base = OTHER; note = 2'-O-methyl modified nucleoside
  modified_base 4: mod_base = OTHER; note = 2'-O-methyl modified nucleoside
  modified_base 5: mod_base = OTHER; note = 2'-O-methyl modified nucleoside
  modified_base 6: mod_base = OTHER; note = 2'-fluoro-modified nucleoside
  modified_base 7: mod_base = OTHER; note = 2'-fluoro-modified nucleoside
  modified_base 8: mod_base = OTHER; note = 2'-fluoro-modified nucleoside
  modified_base 9: mod_base = OTHER; note = 2'-fluoro-modified nucleoside
  modified_base 10: mod_base = OTHER; note = 2'-O-methyl modified nucleoside
  modified_base 11: mod_base = OTHER; note = 2'-O-methyl modified nucleoside
  modified_base 12: mod_base = OTHER; note = 2'-O-methyl modified nucleoside
  modified_base 13: mod_base = OTHER; note = 2'-O-methyl modified nucleoside
  modified_base 14: mod_base = OTHER; note = 2'-O-methyl modified nucleoside
  modified_base 15: mod_base = OTHER; note = 2'-O-methyl modified nucleoside
  modified_base 16: mod_base = OTHER; note = 2'-O-methyl modified nucleoside
  modified_base 17: mod_base = OTHER; note = 2'-O-methyl modified nucleoside
  modified_base 18: mod_base = OTHER; note = 2'-O-methyl modified nucleoside
  modified_base 19: mod_base = OTHER; note = 2'-O-methyl modified nucleoside with phosphorothioate linkage
  modified_base 20: mod_base = OTHER; note = 2'-O-methyl modified nucleoside with phosphorothioate linkage
  modified_base 21: mod_base = OTHER; note = 2'-O-methyl modified nucleoside
attcattccgttaccattatt

SEQ ID NO: 4996 - RNA, 21 nt, synthetic construct
  source 1..21: mol_type = other RNA
  modified_base 1: mod_base = OTHER; note = 2'-O-methyl modified nucleoside
  modified_base 2: mod_base = OTHER; note = 2'-O-methyl modified nucleoside
  modified_base 3: mod_base = OTHER; note = 2'-O-methyl modified nucleoside
  modified_base 4: mod_base = OTHER; note = 2'-O-methyl modified nucleoside
  modified_base 5: mod_base = OTHER; note = 2'-O-methyl modified nucleoside
  modified_base 6: mod_base = OTHER; note = 2'-fluoro-modified nucleoside
  modified_base 7: mod_base = OTHER; note = 2'-fluoro-modified nucleoside
  modified_base 8: mod_base = OTHER; note = 2'-fluoro-modified nucleoside
  modified_base 9: mod_base = OTHER; note = 2'-fluoro-modified nucleoside
  modified_base 10: mod_base = OTHER; note = 2'-O-methyl modified nucleoside
  modified_base 11: mod_base = OTHER; note = 2'-fluoro-modified nucleoside
  modified_base 12: mod_base = OTHER; note = 2'-O-methyl modified nucleoside
  modified_base 13: mod_base = OTHER; note = 2'-O-methyl modified nucleoside
  modified_base 14: mod_base = OTHER; note = 2'-O-methyl modified nucleoside
  modified_base 15: mod_base = OTHER; note = 2'-O-methyl modified nucleoside
  modified_base 16: mod_base = OTHER; note = 2'-O-methyl modified nucleoside
  modified_base 17: mod_base = OTHER; note = 2'-O-methyl modified nucleoside
  modified_base 18: mod_base = OTHER; note = 2'-O-methyl modified nucleoside
  modified_base 19: mod_base = OTHER; note = 2'-O-methyl modified nucleoside with phosphorothioate linkage
  modified_base 20: mod_base = OTHER; note = 2'-O-methyl modified nucleoside with phosphorothioate linkage
  modified_base 21: mod_base = OTHER; note = 2'-O-methyl modified nucleoside
attcattccgttaccattatt

SEQ ID NO: 4997 - RNA, 21 nt, synthetic construct
  source 1..21: mol_type = other RNA
  modified_base 1: mod_base = OTHER; note = 2'-O-methyl modified nucleoside
  modified_base 2: mod_base = OTHER; note = 2'-O-methyl modified nucleoside
  modified_base 3: mod_base = OTHER; note = 2'-O-methyl modified nucleoside
  modified_base 4: mod_base = OTHER; note = 2'-O-methyl modified nucleoside
  modified_base 5: mod_base = OTHER; note = 2'-O-methyl modified nucleoside
  modified_base 6: mod_base = OTHER; note = 2'-O-methyl modified nucleoside
  modified_base 7: mod_base = OTHER; note = 2'-fluoro-modified nucleoside
  modified_base 8: mod_base = OTHER; note = 2'-O-methyl modified nucleoside
  modified_base 9: mod_base = OTHER; note = 2'-fluoro-modified nucleoside
  modified_base 10: mod_base = OTHER; note = 2'-fluoro-modified nucleoside
  modified_base 11: mod_base = OTHER; note = 2'-O-methyl modified nucleoside
  modified_base 12: mod_base = OTHER; note = 2'-O-methyl modified nucleoside
  modified_base 13: mod_base = OTHER; note = 2'-O-methyl modified nucleoside
  modified_base 14: mod_base = OTHER; note = 2'-O-methyl modified nucleoside
  modified_base 15: mod_base = OTHER; note = 2'-O-methyl modified nucleoside
  modified_base 16: mod_base = OTHER; note = 2'-O-methyl modified nucleoside
  modified_base 17: mod_base = OTHER; note = 2'-O-methyl modified nucleoside
  modified_base 18: mod_base = OTHER; note = 2'-O-methyl modified nucleoside
  modified_base 19: mod_base = OTHER; note = 2'-O-methyl modified nucleoside with phosphorothioate linkage
  modified_base 20: mod_base = OTHER; note = 2'-O-methyl modified nucleoside with phosphorothioate linkage
  modified_base 21: mod_base = OTHER; note = 2'-O-methyl modified nucleoside
atcagttgtcaagtaattatt

SEQ ID NO: 4998 - RNA, 21 nt, synthetic construct
  source 1..21: mol_type = other RNA
  modified_base 1: mod_base = OTHER; note = 2'-O-methyl modified nucleoside
  modified_base 2: mod_base = OTHER; note = 2'-O-methyl modified nucleoside
  modified_base 3: mod_base = OTHER; note = 2'-O-methyl modified nucleoside
  modified_base 4: mod_base = OTHER; note = 2'-O-methyl modified nucleoside
  modified_base 5: mod_base = OTHER; note = 2'-O-methyl modified nucleoside
  modified_base 6: mod_base = OTHER; note = 2'-fluoro-modified nucleoside
  modified_base 7: mod_base = OTHER; note = 2'-O-methyl modified nucleoside
  modified_base 8: mod_base = OTHER; note = 2'-O-methyl modified nucleoside
  modified_base 9: mod_base = OTHER; note = 2'-fluoro-modified nucleoside
  modified_base 10: mod_base = OTHER; note = 2'-fluoro-modified nucleoside
  modified_base 11: mod_base = OTHER; note = 2'-O-methyl modified nucleoside
  modified_base 12: mod_base = OTHER; note = 2'-O-methyl modified nucleoside
  modified_base 13: mod_base = OTHER; note = 2'-O-methyl modified nucleoside
  modified_base 14: mod_base = OTHER; note = 2'-O-methyl modified nucleoside
  modified_base 15: mod_base = OTHER; note = 2'-O-methyl modified nucleoside
  modified_base 16: mod_base = OTHER; note = 2'-O-methyl modified nucleoside
  modified_base 17: mod_base = OTHER; note = 2'-O-methyl modified nucleoside
  modified_base 18: mod_base = OTHER; note = 2'-O-methyl modified nucleoside
  modified_base 19: mod_base = OTHER; note = 2'-O-methyl modified nucleoside with phosphorothioate linkage
  modified_base 20: mod_base = OTHER; note = 2'-O-methyl modified nucleoside with phosphorothioate linkage
  modified_base 21: mod_base = OTHER; note = 2'-O-methyl modified nucleoside
atcagttgtcaagtaattatt

SEQ ID NO: 4999 - RNA, 21 nt, synthetic construct
  source 1..21: mol_type = other RNA
  modified_base 1: mod_base = OTHER; note = 2'-O-methyl modified nucleoside
  modified_base 2: mod_base = OTHER; note = 2'-O-methyl modified nucleoside
  modified_base 3: mod_base = OTHER; note = 2'-O-methyl modified nucleoside
  modified_base 4: mod_base = OTHER; note = 2'-O-methyl modified nucleoside
  modified_base 5: mod_base = OTHER; note = 2'-O-methyl modified nucleoside
  modified_base 6: mod_base = OTHER; note = 2'-fluoro-modified nucleoside
  modified_base 7: mod_base = OTHER; note = 2'-fluoro-modified nucleoside
  modified_base 8: mod_base = OTHER; note = 2'-O-methyl modified nucleoside
  modified_base 9: mod_base = OTHER; note = 2'-fluoro-modified nucleoside
  modified_base 10: mod_base = OTHER; note = 2'-O-methyl modified nucleoside
  modified_base 11: mod_base = OTHER; note = 2'-O-methyl modified nucleoside
  modified_base 12: mod_base = OTHER; note = 2'-O-methyl modified nucleoside
  modified_base 13: mod_base = OTHER; note = 2'-O-methyl modified nucleoside
  modified_base 14: mod_base = OTHER; note = 2'-O-methyl modified nucleoside
  modified_base 15: mod_base = OTHER; note = 2'-O-methyl modified nucleoside
  modified_base 16: mod_base = OTHER; note = 2'-O-methyl modified nucleoside
  modified_base 17: mod_base = OTHER; note = 2'-O-methyl modified nucleoside
  modified_base 18: mod_base = OTHER; note = 2'-O-methyl modified nucleoside
  modified_base 19: mod_base = OTHER; note = 2'-O-methyl modified nucleoside with phosphorothioate linkage
  modified_base 20: mod_base = OTHER; note = 2'-O-methyl modified nucleoside with phosphorothioate linkage
  modified_base 21: mod_base = OTHER; note = 2'-O-methyl modified nucleoside
atcagttgtcaagtaattatt

SEQ ID NO: 5000 - RNA, 21 nt, synthetic construct
  source 1..21: mol_type = other RNA
  modified_base 1: mod_base = OTHER; note = 2'-O-methyl modified nucleoside
  modified_base 2: mod_base = OTHER; note = 2'-O-methyl modified nucleoside
  modified_base 3: mod_base = OTHER; note = 2'-O-methyl modified nucleoside
  modified_base 4: mod_base = OTHER; note = 2'-O-methyl modified nucleoside
  modified_base 5: mod_base = OTHER; note = 2'-O-methyl modified nucleoside
  modified_base 6: mod_base = OTHER; note = 2'-fluoro-modified nucleoside
  modified_base 7: mod_base = OTHER; note = 2'-fluoro-modified nucleoside
  modified_base 8: mod_base = OTHER; note = 2'-O-methyl modified nucleoside
  modified_base 9: mod_base = OTHER; note = 2'-fluoro-modified nucleoside
  modified_base 10: mod_base = OTHER; note = 2'-fluoro-modified nucleoside
  modified_base 11: mod_base = OTHER; note = 2'-O-methyl modified nucleoside
  modified_base 12: mod_base = OTHER; note = 2'-O-methyl modified nucleoside
  modified_base 13: mod_base = OTHER; note = 2'-O-methyl modified nucleoside
  modified_base 14: mod_base = OTHER; note = 2'-O-methyl modified nucleoside
  modified_base 15: mod_base = OTHER; note = 2'-O-methyl modified nucleoside
  modified_base 16: mod_base = OTHER; note = 2'-O-methyl modified nucleoside
  modified_base 17: mod_base = OTHER; note = 2'-O-methyl modified nucleoside
  modified_base 18: mod_base = OTHER; note = 2'-O-methyl modified nucleoside
  modified_base 19: mod_base = OTHER; note = 2'-O-methyl modified nucleoside with phosphorothioate linkage
  modified_base 20: mod_base = OTHER; note = 2'-O-methyl modified nucleoside with phosphorothioate linkage
  modified_base 21: mod_base = OTHER; note = 2'-O-methyl modified nucleoside
atcagttgtcaagtaattatt

SEQ ID NO: 5001 - RNA, 21 nt, synthetic construct
  source 1..21: mol_type = other RNA
  modified_base 1: mod_base = OTHER; note = 2'-O-methyl modified nucleoside
  modified_base 2: mod_base = OTHER; note = 2'-O-methyl modified nucleoside
  modified_base 3: mod_base = OTHER; note = 2'-O-methyl modified nucleoside
  modified_base 4: mod_base = OTHER; note = 2'-O-methyl modified nucleoside
  modified_base 5: mod_base = OTHER; note = 2'-O-methyl modified nucleoside
  modified_base 6: mod_base = OTHER; note = 2'-O-methyl modified nucleoside
  modified_base 7: mod_base = OTHER; note = 2'-fluoro-modified nucleoside
  modified_base 8: mod_base = OTHER; note = 2'-O-methyl modified nucleoside
  modified_base 9: mod_base = OTHER; note = 2'-fluoro-modified nucleoside
  modified_base 10: mod_base = OTHER; note = 2'-fluoro-modified nucleoside
  modified_base 11: mod_base = OTHER; note = 2'-O-methyl modified nucleoside
  modified_base 12: mod_base = OTHER; note = 2'-O-methyl modified nucleoside
  modified_base 13: mod_base = OTHER; note = 2'-O-methyl modified nucleoside
  modified_base 14: mod_base = OTHER; note = 2'-O-methyl modified nucleoside
  modified_base 15: mod_base = OTHER; note = 2'-O-methyl modified nucleoside
  modified_base 16: mod_base = OTHER; note = 2'-O-methyl modified nucleoside
  modified_base 17: mod_base = OTHER; note = 2'-O-methyl modified nucleoside
  modified_base 18: mod_base = OTHER; note = 2'-O-methyl modified nucleoside
  modified_base 19: mod_base = OTHER; note = 2'-O-methyl modified nucleoside with phosphorothioate linkage
  modified_base 20: mod_base = OTHER; note = 2'-O-methyl modified nucleoside with phosphorothioate linkage
  modified_base 21: mod_base = OTHER; note = 2'-O-methyl modified nucleoside
tgtcaagtaattgttacaatt

SEQ ID NO: 5002 - RNA, 21 nt, synthetic construct
  source 1..21: mol_type = other RNA
  modified_base 1: mod_base = OTHER; note = 2'-O-methyl modified nucleoside
  modified_base 2: mod_base = OTHER; note = 2'-O-methyl modified nucleoside
  modified_base 3: mod_base = OTHER; note = 2'-O-methyl modified nucleoside
  modified_base 4: mod_base = OTHER; note = 2'-O-methyl modified nucleoside
  modified_base 5: mod_base = OTHER; note = 2'-O-methyl modified nucleoside
  modified_base 6: mod_base = OTHER; note = 2'-fluoro-modified nucleoside
  modified_base 7: mod_base = OTHER; note = 2'-O-methyl modified nucleoside
  modified_base 8: mod_base = OTHER; note = 2'-O-methyl modified nucleoside
  modified_base 9: mod_base = OTHER; note = 2'-fluoro-modified nucleoside
  modified_base 10: mod_base = OTHER; note = 2'-fluoro-modified nucleoside
  modified_base 11: mod_base = OTHER; note = 2'-O-methyl modified nucleoside
  modified_base 12: mod_base = OTHER; note = 2'-O-methyl modified nucleoside
  modified_base 13: mod_base = OTHER; note = 2'-O-methyl modified nucleoside
  modified_base 14: mod_base = OTHER; note = 2'-O-methyl modified nucleoside
  modified_base 15: mod_base = OTHER; note = 2'-O-methyl modified nucleoside
  modified_base 16: mod_base = OTHER; note = 2'-O-methyl modified nucleoside
  modified_base 17: mod_base = OTHER; note = 2'-O-methyl modified nucleoside
  modified_base 18: mod_base = OTHER; note = 2'-O-methyl modified nucleoside
  modified_base 19: mod_base = OTHER; note = 2'-O-methyl modified nucleoside with phosphorothioate linkage
  modified_base 20: mod_base = OTHER; note = 2'-O-methyl modified nucleoside with phosphorothioate linkage
  modified_base 21: mod_base = OTHER; note = 2'-O-methyl modified nucleoside
tgtcaagtaattgttacaatt

SEQ ID NO: 5003 - RNA, 21 nt, synthetic construct
  source 1..21: mol_type = other RNA
  modified_base 1: mod_base = OTHER; note = 2'-O-methyl modified nucleoside
  modified_base 2: mod_base = OTHER; note = 2'-O-methyl modified nucleoside
  modified_base 3: mod_base = OTHER; note = 2'-O-methyl modified nucleoside
  modified_base 4: mod_base = OTHER; note = 2'-O-methyl modified nucleoside
  modified_base 5: mod_base = OTHER; note = 2'-O-methyl modified nucleoside
  modified_base 6: mod_base = OTHER; note = 2'-fluoro-modified nucleoside
  modified_base 7: mod_base = OTHER; note = 2'-fluoro-modified nucleoside
  modified_base 8: mod_base = OTHER; note = 2'-O-methyl modified nucleoside
  modified_base 9: mod_base = OTHER; note = 2'-fluoro-modified nucleoside
  modified_base 10: mod_base = OTHER; note = 2'-O-methyl modified nucleoside
  modified_base 11: mod_base = OTHER; note = 2'-O-methyl modified nucleoside
  modified_base 12: mod_base = OTHER; note = 2'-O-methyl modified nucleoside
  modified_base 13: mod_base = OTHER; note = 2'-O-methyl modified nucleoside
  modified_base 14: mod_base = OTHER; note = 2'-O-methyl modified nucleoside
  modified_base 15: mod_base = OTHER; note = 2'-O-methyl modified nucleoside
  modified_base 16: mod_base = OTHER; note = 2'-O-methyl modified nucleoside
  modified_base 17: mod_base = OTHER; note = 2'-O-methyl modified nucleoside
  modified_base 18: mod_base = OTHER; note = 2'-O-methyl modified nucleoside
  modified_base 19: mod_base = OTHER; note = 2'-O-methyl modified nucleoside with phosphorothioate linkage
  modified_base 20: mod_base = OTHER; note = 2'-O-methyl modified nucleoside with phosphorothioate linkage
  modified_base 21: mod_base = OTHER; note = 2'-O-methyl modified nucleoside
tgtcaagtaattgttacaatt

SEQ ID NO: 5004 - RNA, 21 nt, synthetic construct
  source 1..21: mol_type = other RNA
  modified_base 1: mod_base = OTHER; note = 2'-O-methyl modified nucleoside
  modified_base 2: mod_base = OTHER; note = 2'-O-methyl modified nucleoside
  modified_base 3: mod_base = OTHER; note = 2'-O-methyl modified nucleoside
  modified_base 4: mod_base = OTHER; note = 2'-O-methyl modified nucleoside
  modified_base 5: mod_base = OTHER; note = 2'-O-methyl modified nucleoside
  modified_base 6: mod_base = OTHER; note = 2'-fluoro-modified nucleoside
  modified_base 7: mod_base = OTHER; note = 2'-fluoro-modified nucleoside
  modified_base 8: mod_base = OTHER; note = 2'-O-methyl modified nucleoside
  modified_base 9: mod_base = OTHER; note = 2'-fluoro-modified nucleoside
  modified_base 10: mod_base = OTHER; note = 2'-fluoro-modified nucleoside
  modified_base 11: mod_base = OTHER; note = 2'-O-methyl modified nucleoside
  modified_base 12: mod_base = OTHER; note = 2'-O-methyl modified nucleoside
  modified_base 13: mod_base = OTHER; note = 2'-O-methyl modified nucleoside
  modified_base 14: mod_base = OTHER; note = 2'-O-methyl modified nucleoside
  modified_base 15: mod_base = OTHER; note = 2'-O-methyl modified nucleoside
  modified_base 16: mod_base = OTHER; note = 2'-O-methyl modified nucleoside
  modified_base 17: mod_base = OTHER; note = 2'-O-methyl modified nucleoside
  modified_base 18: mod_base = OTHER; note = 2'-O-methyl modified nucleoside
  modified_base 19: mod_base = OTHER; note = 2'-O-methyl modified nucleoside with phosphorothioate linkage
  modified_base 20: mod_base = OTHER; note = 2'-O-methyl modified nucleoside with phosphorothioate linkage
  modified_base 21: mod_base = OTHER; note = 2'-O-methyl modified nucleoside
tgtcaagtaattgttacaatt

SEQ ID NO: 5005 - RNA, 21 nt, synthetic construct
  source 1..21: mol_type = other RNA
  modified_base 1: mod_base = OTHER; note = 2'-O-methyl modified nucleoside
  modified_base 2: mod_base = OTHER; note = 2'-O-methyl modified nucleoside
  modified_base 3: mod_base = OTHER; note = 2'-O-methyl modified nucleoside
  modified_base 4: mod_base = OTHER; note = 2'-O-methyl modified nucleoside
  modified_base 5: mod_base = OTHER; note = 2'-fluoro-modified nucleoside
  modified_base 6: mod_base = OTHER; note = 2'-O-methyl modified nucleoside
  modified_base 7: mod_base = OTHER; note = 2'-O-methyl modified nucleoside
  modified_base 8: mod_base = OTHER; note = 2'-O-methyl modified nucleoside
  modified_base 9: mod_base = OTHER; note = 2'-fluoro-modified nucleoside
  modified_base 10: mod_base = OTHER; note = 2'-fluoro-modified nucleoside
  modified_base 11: mod_base = OTHER; note = 2'-O-methyl modified nucleoside
  modified_base 12: mod_base = OTHER; note = 2'-O-methyl modified nucleoside
  modified_base 13: mod_base = OTHER; note = 2'-O-methyl modified nucleoside
  modified_base 14: mod_base = OTHER; note = 2'-O-methyl modified nucleoside
  modified_base 15: mod_base = OTHER; note = 2'-O-methyl modified nucleoside
  modified_base 16: mod_base = OTHER; note = 2'-O-methyl modified nucleoside
  modified_base 17: mod_base = OTHER; note = 2'-O-methyl modified nucleoside
  modified_base 18: mod_base = OTHER; note = 2'-O-methyl modified nucleoside
  modified_base 19: mod_base = OTHER; note = 2'-O-methyl modified nucleoside with phosphorothioate linkage
  modified_base 20: mod_base = OTHER; note = 2'-O-methyl modified nucleoside with phosphorothioate linkage
  modified_base 21: mod_base = OTHER; note = 2'-O-methyl modified nucleoside
tgtcaagtaattgttacaatt

SEQ ID NO: 5006 - RNA, 21 nt, synthetic construct
  source 1..21: mol_type = other RNA
  modified_base 1: mod_base = OTHER; note = 2'-O-methyl modified nucleoside
  modified_base 2: mod_base = OTHER; note = 2'-O-methyl modified nucleoside
  modified_base 3: mod_base = OTHER; note = 2'-O-methyl modified nucleoside
  modified_base 4: mod_base = OTHER; note = 2'-O-methyl modified nucleoside
  modified_base 5: mod_base = OTHER; note = 2'-fluoro-modified nucleoside
  modified_base 6: mod_base = OTHER; note = 2'-O-methyl modified nucleoside
  modified_base 7: mod_base = OTHER; note = 2'-fluoro-modified nucleoside
  modified_base 8: mod_base = OTHER; note = 2'-O-methyl modified nucleoside
  modified_base 9: mod_base = OTHER; note = 2'-fluoro-modified nucleoside
  modified_base 10: mod_base = OTHER; note = 2'-O-methyl modified nucleoside
  modified_base 11: mod_base = OTHER; note = 2'-O-methyl modified nucleoside
  modified_base 12: mod_base = OTHER; note = 2'-O-methyl modified nucleoside
  modified_base 13: mod_base = OTHER; note = 2'-O-methyl modified nucleoside
  modified_base 14: mod_base = OTHER; note = 2'-O-methyl modified nucleoside
  modified_base 15: mod_base = OTHER; note = 2'-O-methyl modified nucleoside
  modified_base 16: mod_base = OTHER; note = 2'-O-methyl modified nucleoside
  modified_base 17: mod_base = OTHER; note = 2'-O-methyl modified nucleoside
  modified_base 18: mod_base = OTHER; note = 2'-O-methyl modified nucleoside
  modified_base 19: mod_base = OTHER; note = 2'-O-methyl modified nucleoside with phosphorothioate linkage
  modified_base 20: mod_base = OTHER; note = 2'-O-methyl modified nucleoside with phosphorothioate linkage
  modified_base 21: mod_base = OTHER; note = 2'-O-methyl modified nucleoside
tgtcaagtaattgttacaatt

SEQ ID NO: 5007 - RNA, 21 nt, synthetic construct
  source 1..21: mol_type = other RNA
  modified_base 1: mod_base = OTHER; note = 2'-O-methyl modified nucleoside
  modified_base 2: mod_base = OTHER; note = 2'-O-methyl modified nucleoside
  modified_base 3: mod_base = OTHER; note = 2'-O-methyl modified nucleoside
  modified_base 4: mod_base = OTHER; note = 2'-O-methyl modified nucleoside
  modified_base 5: mod_base = OTHER; note = 2'-fluoro-modified nucleoside
  modified_base 6: mod_base = OTHER; note = 2'-O-methyl modified nucleoside
  modified_base 7: mod_base = OTHER; note = 2'-fluoro-modified nucleoside
  modified_base 8: mod_base = OTHER; note = 2'-O-methyl modified nucleoside
  modified_base 9: mod_base = OTHER; note = 2'-fluoro-modified nucleoside
  modified_base 10: mod_base = OTHER; note = 2'-fluoro-modified nucleoside
  modified_base 11: mod_base = OTHER; note = 2'-O-methyl modified nucleoside
  modified_base 12: mod_base = OTHER; note = 2'-O-methyl modified nucleoside
  modified_base 13: mod_base = OTHER; note = 2'-O-methyl modified nucleoside
  modified_base 14: mod_base = OTHER; note = 2'-O-methyl modified nucleoside
  modified_base 15: mod_base = OTHER; note = 2'-O-methyl modified nucleoside
  modified_base 16: mod_base = OTHER; note = 2'-O-methyl modified nucleoside
  modified_base 17: mod_base = OTHER; note = 2'-O-methyl modified nucleoside
  modified_base 18: mod_base = OTHER; note = 2'-O-methyl modified nucleoside
  modified_base 19: mod_base = OTHER; note = 2'-O-methyl modified nucleoside with phosphorothioate linkage
  modified_base 20: mod_base = OTHER; note = 2'-O-methyl modified nucleoside with phosphorothioate linkage
  modified_base 21: mod_base = OTHER; note = 2'-O-methyl modified nucleoside
tgtcaagtaattgttacaatt

SEQ ID NO: 5008 - RNA, 21 nt, synthetic construct
  source 1..21: mol_type = other RNA
  modified_base 1: mod_base = OTHER; note = 2'-O-methyl modified nucleoside
  modified_base 2: mod_base = OTHER; note = 2'-O-methyl modified nucleoside
  modified_base 3: mod_base = OTHER; note = 2'-O-methyl modified nucleoside
  modified_base 4: mod_base = OTHER; note = 2'-O-methyl modified nucleoside
  modified_base 5: mod_base = OTHER; note = 2'-fluoro-modified nucleoside
  modified_base 6: mod_base = OTHER; note = 2'-fluoro-modified nucleoside
  modified_base 7: mod_base = OTHER; note = 2'-O-methyl modified nucleoside
  modified_base 8: mod_base = OTHER; note = 2'-O-methyl modified nucleoside
  modified_base 9: mod_base = OTHER; note = 2'-fluoro-modified nucleoside
  modified_base 10: mod_base = OTHER; note = 2'-O-methyl modified nucleoside
  modified_base 11: mod_base = OTHER; note = 2'-O-methyl modified nucleoside
  modified_base 12: mod_base = OTHER; note = 2'-O-methyl modified nucleoside
  modified_base 13: mod_base = OTHER; note = 2'-O-methyl modified nucleoside
  modified_base 14: mod_base = OTHER; note = 2'-O-methyl modified nucleoside
  modified_base 15: mod_base = OTHER; note = 2'-O-methyl modified nucleoside
  modified_base 16: mod_base = OTHER; note = 2'-O-methyl modified nucleoside
  modified_base 17: mod_base = OTHER; note = 2'-O-methyl modified nucleoside
  modified_base 18: mod_base = OTHER; note = 2'-O-methyl modified nucleoside
  modified_base 19: mod_base = OTHER; note = 2'-O-methyl modified nucleoside with phosphorothioate linkage
  modified_base 20: mod_base = OTHER; note = 2'-O-methyl modified nucleoside with phosphorothioate linkage
  modified_base 21: mod_base = OTHER; note = 2'-O-methyl modified nucleoside
tgtcaagtaattgttacaatt

SEQ ID NO: 5009 - RNA, 21 nt, synthetic construct
  source 1..21: mol_type = other RNA
  modified_base 1: mod_base = OTHER; note = 2'-O-methyl modified nucleoside
  modified_base 2: mod_base = OTHER; note = 2'-O-methyl modified nucleoside
  modified_base 3: mod_base = OTHER; note = 2'-O-methyl modified nucleoside
  modified_base 4: mod_base = OTHER; note = 2'-O-methyl modified nucleoside
  modified_base 5: mod_base = OTHER; note = 2'-fluoro-modified nucleoside
  modified_base 6: mod_base = OTHER; note = 2'-fluoro-modified nucleoside
  modified_base 7: mod_base = OTHER; note = 2'-O-methyl modified nucleoside
  modified_base 8: mod_base = OTHER; note = 2'-O-methyl modified nucleoside
  modified_base 9: mod_base = OTHER; note = 2'-fluoro-modified nucleoside
  modified_base 10: mod_base = OTHER; note = 2'-fluoro-modified nucleoside
  modified_base 11: mod_base = OTHER; note = 2'-O-methyl modified nucleoside
  modified_base 12: mod_base = OTHER; note = 2'-O-methyl modified nucleoside
  modified_base 13: mod_base = OTHER; note = 2'-O-methyl modified nucleoside
  modified_base 14: mod_base = OTHER; note = 2'-O-methyl modified nucleoside
  modified_base 15: mod_base = OTHER; note = 2'-O-methyl modified nucleoside
  modified_base 16: mod_base = OTHER; note = 2'-O-methyl modified nucleoside
  modified_base 17: mod_base = OTHER; note = 2'-O-methyl modified nucleoside
  modified_base 18: mod_base = OTHER; note = 2'-O-methyl modified nucleoside
  modified_base 19: mod_base = OTHER; note = 2'-O-methyl modified nucleoside with phosphorothioate linkage
  modified_base 20: mod_base = OTHER; note = 2'-O-methyl modified nucleoside with phosphorothioate linkage
  modified_base 21: mod_base = OTHER; note = 2'-O-methyl modified nucleoside
tgtcaagtaattgttacaatt

SEQ ID NO: 5010 - RNA, 21 nt, synthetic construct
  source 1..21: mol_type = other RNA
  modified_base 1: mod_base = OTHER; note = 2'-O-methyl modified nucleoside
  modified_base 2: mod_base = OTHER; note = 2'-O-methyl modified nucleoside
  modified_base 3: mod_base = OTHER; note = 2'-O-methyl modified nucleoside
  modified_base 4: mod_base = OTHER; note = 2'-O-methyl modified nucleoside
  modified_base 5: mod_base = OTHER; note = 2'-O-methyl modified nucleoside
  modified_base 6: mod_base = OTHER; note = 2'-O-methyl modified nucleoside
  modified_base 7: mod_base = OTHER; note = 2'-fluoro-modified nucleoside
  modified_base 8: mod_base = OTHER; note = 2'-O-methyl modified nucleoside
  modified_base 9: mod_base = OTHER; note = 2'-fluoro-modified nucleoside
  modified_base 10: mod_base = OTHER; note = 2'-fluoro-modified nucleoside
  modified_base 11: mod_base = OTHER; note = 2'-O-methyl modified nucleoside
  modified_base 12: mod_base = OTHER; note = 2'-O-methyl modified nucleoside
  modified_base 13: mod_base = OTHER; note = 2'-O-methyl modified nucleoside
  modified_base 14: mod_base = OTHER; note = 2'-O-methyl modified nucleoside
  modified_base 15: mod_base = OTHER; note = 2'-O-methyl modified nucleoside
  modified_base 16: mod_base = OTHER; note = 2'-O-methyl modified nucleoside
  modified_base 17: mod_base = OTHER; note = 2'-O-methyl modified nucleoside
  modified_base 18: mod_base = OTHER; note = 2'-O-methyl modified nucleoside
  modified_base 19: mod_base = OTHER; note = 2'-O-methyl modified nucleoside with phosphorothioate linkage
  modified_base 20: mod_base = OTHER; note = 2'-O-methyl modified nucleoside with phosphorothioate linkage
  modified_base 21: mod_base = OTHER; note = 2'-O-methyl modified nucleoside
tgttacatgactatgtccatt

SEQ ID NO: 5011 - RNA, 21 nt, synthetic construct
  source 1..21: mol_type = other RNA
  modified_base 1: mod_base = OTHER; note = 2'-O-methyl modified nucleoside
  modified_base 2: mod_base = OTHER; note = 2'-O-methyl modified nucleoside
  modified_base 3: mod_base = OTHER; note = 2'-O-methyl modified nucleoside
  modified_base 4: mod_base = OTHER; note = 2'-O-methyl modified nucleoside
  modified_base 5: mod_base = OTHER; note = 2'-fluoro-modified nucleoside
  modified_base 6: mod_base = OTHER; note = 2'-O-methyl modified nucleoside
  modified_base 7: mod_base = OTHER; note = 2'-O-methyl modified nucleoside
  modified_base 8: mod_base = OTHER; note = 2'-O-methyl modified nucleoside
  modified_base 9: mod_base = OTHER; note = 2'-fluoro-modified nucleoside
  modified_base 10: mod_base = OTHER; note = 2'-fluoro-modified nucleoside
  modified_base 11: mod_base = OTHER; note = 2'-O-methyl modified nucleoside
  modified_base 12: mod_base = OTHER; note = 2'-O-methyl modified nucleoside
  modified_base 13: mod_base = OTHER; note = 2'-O-methyl modified nucleoside
  modified_base 14: mod_base = OTHER; note = 2'-O-methyl modified nucleoside
  modified_base 15: mod_base = OTHER; note = 2'-O-methyl modified nucleoside
  modified_base 16: mod_base = OTHER; note = 2'-O-methyl modified nucleoside
  modified_base 17: mod_base = OTHER; note = 2'-O-methyl modified nucleoside
  modified_base 18: mod_base = OTHER; note = 2'-O-methyl modified nucleoside
  modified_base 19: mod_base = OTHER; note = 2'-O-methyl modified nucleoside with phosphorothioate linkage
  modified_base 20: mod_base = OTHER; note = 2'-O-methyl modified nucleoside with phosphorothioate linkage
  modified_base 21: mod_base = OTHER; note = 2'-O-methyl modified nucleoside
tgttacatgactatgtccatt

SEQ ID NO: 5012 - RNA, 21 nt, synthetic construct
  source 1..21: mol_type = other RNA
  modified_base 1: mod_base = OTHER; note = 2'-O-methyl modified nucleoside
  modified_base 2: mod_base = OTHER; note = 2'-O-methyl modified nucleoside
  modified_base 3: mod_base = OTHER; note = 2'-O-methyl modified nucleoside
  modified_base 4: mod_base = OTHER; note = 2'-O-methyl modified nucleoside
  modified_base 5: mod_base = OTHER; note = 2'-fluoro-modified nucleoside
  modified_base 6: mod_base = OTHER; note = 2'-O-methyl modified nucleoside
  modified_base 7: mod_base = OTHER; note = 2'-fluoro-modified nucleoside
  modified_base 8: mod_base = OTHER; note = 2'-O-methyl modified nucleoside
  modified_base 9: mod_base = OTHER; note = 2'-fluoro-modified nucleoside
  modified_base 10: mod_base = OTHER; note = 2'-O-methyl modified nucleoside
  modified_base 11: mod_base = OTHER; note = 2'-O-methyl modified nucleoside
  modified_base 12: mod_base = OTHER; note = 2'-O-methyl modified nucleoside
  modified_base 13: mod_base = OTHER; note = 2'-O-methyl modified nucleoside
  modified_base 14: mod_base = OTHER; note = 2'-O-methyl modified nucleoside
  modified_base 15: mod_base = OTHER; note = 2'-O-methyl modified nucleoside
  modified_base 16: mod_base = OTHER; note = 2'-O-methyl modified nucleoside
  modified_base 17: mod_base = OTHER; note = 2'-O-methyl modified nucleoside
  modified_base 18: mod_base = OTHER; note = 2'-O-methyl modified nucleoside
  modified_base 19: mod_base = OTHER; note = 2'-O-methyl modified nucleoside with phosphorothioate linkage
  modified_base 20: mod_base = OTHER; note = 2'-O-methyl modified nucleoside with phosphorothioate linkage
  modified_base 21: mod_base = OTHER; note = 2'-O-methyl modified nucleoside
tgttacatgactatgtccatt

SEQ ID NO: 5013 - RNA, 21 nt, synthetic construct
  source 1..21: mol_type = other RNA
  modified_base 1: mod_base = OTHER; note = 2'-O-methyl modified nucleoside
  modified_base 2: mod_base = OTHER; note = 2'-O-methyl modified nucleoside
  modified_base 3: mod_base = OTHER; note = 2'-O-methyl modified nucleoside
  modified_base 4: mod_base = OTHER; note = 2'-O-methyl modified nucleoside
  modified_base 5: mod_base = OTHER; note = 2'-fluoro-modified nucleoside
  modified_base 6: mod_base = OTHER; note = 2'-O-methyl modified nucleoside
  modified_base 7: mod_base = OTHER; note = 2'-fluoro-modified nucleoside
  modified_base 8: mod_base = OTHER; note = 2'-O-methyl modified nucleoside
  modified_base 9: mod_base = OTHER; note = 2'-fluoro-modified nucleoside
  modified_base 10: mod_base = OTHER; note = 2'-fluoro-modified nucleoside
  modified_base 11: mod_base = OTHER; note = 2'-O-methyl modified nucleoside
  modified_base 12: mod_base = OTHER; note = 2'-O-methyl modified nucleoside
  modified_base 13: mod_base = OTHER; note = 2'-O-methyl modified nucleoside
  modified_base 14: mod_base = OTHER; note = 2'-O-methyl modified nucleoside
  modified_base 15: mod_base = OTHER; note = 2'-O-methyl modified nucleoside
  modified_base 16: mod_base = OTHER; note = 2'-O-methyl modified nucleoside
  modified_base 17: mod_base = OTHER; note = 2'-O-methyl modified nucleoside
  modified_base 18: mod_base = OTHER; note = 2'-O-methyl modified nucleoside
  modified_base 19: mod_base = OTHER; note = 2'-O-methyl modified nucleoside with phosphorothioate linkage
  modified_base 20: mod_base = OTHER; note = 2'-O-methyl modified nucleoside with phosphorothioate linkage
  modified_base 21: mod_base = OTHER; note = 2'-O-methyl modified nucleoside
tgttacatgactatgtccatt

SEQ ID NO: 5014 - RNA, 21 nt, synthetic construct
  source 1..21: mol_type = other RNA
  modified_base 1: mod_base = OTHER; note = 2'-O-methyl modified nucleoside
  modified_base 2: mod_base = OTHER; note = 2'-O-methyl modified nucleoside
  modified_base 3: mod_base = OTHER; note = 2'-O-methyl modified nucleoside
  modified_base 4: mod_base = OTHER; note = 2'-O-methyl modified nucleoside
  modified_base 5: mod_base = OTHER; note = 2'-O-methyl modified nucleoside
  modified_base 6: mod_base = OTHER; note = 2'-O-methyl modified nucleoside
  modified_base 7: mod_base = OTHER; note = 2'-O-methyl modified nucleoside
  modified_base 8: mod_base = OTHER; note = 2'-fluoro-modified nucleoside
  modified_base 9: mod_base = OTHER; note = 2'-fluoro-modified nucleoside
  modified_base 10: mod_base = OTHER; note = 2'-O-methyl modified nucleoside
  modified_base 11: mod_base = OTHER; note = 2'-fluoro-modified nucleoside
  modified_base 12: mod_base = OTHER; note = 2'-O-methyl modified nucleoside
  modified_base 13: mod_base = OTHER; note = 2'-O-methyl modified nucleoside
  modified_base 14: mod_base = OTHER; note = 2'-O-methyl modified nucleoside
  modified_base 15: mod_base = OTHER; note = 2'-O-methyl modified nucleoside
  modified_base 16: mod_base = OTHER; note = 2'-O-methyl modified nucleoside
  modified_base 17: mod_base = OTHER; note = 2'-O-methyl modified nucleoside
  modified_base 18: mod_base = OTHER; note = 2'-O-methyl modified nucleoside
  modified_base 19: mod_base = OTHER; note = 2'-O-methyl modified nucleoside with phosphorothioate linkage
  modified_base 20: mod_base = OTHER; note = 2'-O-methyl modified nucleoside with phosphorothioate linkage
  modified_base 21: mod_base = OTHER; note = 2'-O-methyl modified nucleoside
tacatgactatgtccattatt

SEQ ID NO: 5015 - RNA, 21 nt, synthetic construct
  source 1..21: mol_type = other RNA
  modified_base 1: mod_base = OTHER; note = 2'-O-methyl modified nucleoside
  modified_base 2: mod_base = OTHER; note = 2'-O-methyl modified nucleoside
  modified_base 3: mod_base = OTHER; note = 2'-O-methyl modified nucleoside
  modified_base 4: mod_base = OTHER; note = 2'-O-methyl modified nucleoside
  modified_base 5: mod_base = OTHER; note = 2'-fluoro-modified nucleoside
  modified_base 6: mod_base = OTHER; note = 2'-O-methyl modified nucleoside
  modified_base 7: mod_base = OTHER; note = 2'-O-methyl modified nucleoside
  modified_base 8: mod_base = OTHER; note = 2'-O-methyl modified nucleoside
  modified_base 9: mod_base = OTHER; note = 2'-fluoro-modified nucleoside
  modified_base 10: mod_base = OTHER; note = 2'-O-methyl modified nucleoside
  modified_base 11: mod_base = OTHER; note = 2'-fluoro-modified nucleoside
  modified_base 12: mod_base = OTHER; note = 2'-O-methyl modified nucleoside
  modified_base 13: mod_base = OTHER; note = 2'-O-methyl modified nucleoside
  modified_base 14: mod_base = OTHER; note = 2'-O-methyl modified nucleoside
  modified_base 15: mod_base = OTHER; note = 2'-O-methyl modified nucleoside
  modified_base 16: mod_base = OTHER; note = 2'-O-methyl modified nucleoside
  modified_base 17: mod_base = OTHER; note = 2'-O-methyl modified nucleoside
  modified_base 18: mod_base = OTHER; note = 2'-O-methyl modified nucleoside
  modified_base 19: mod_base = OTHER; note = 2'-O-methyl modified nucleoside with phosphorothioate linkage
  modified_base 20: mod_base = OTHER; note = 2'-O-methyl modified nucleoside with phosphorothioate linkage
  modified_base 21: mod_base = OTHER; note = 2'-O-methyl modified nucleoside
tacatgactatgtccattatt

SEQ ID NO: 5016 - RNA, 21 nt, synthetic construct
  source 1..21: mol_type = other RNA
  modified_base 1: mod_base = OTHER; note = 2'-O-methyl modified nucleoside
  modified_base 2: mod_base = OTHER; note = 2'-O-methyl modified nucleoside
  modified_base 3: mod_base = OTHER; note = 2'-O-methyl modified nucleoside
  modified_base 4: mod_base = OTHER; note = 2'-O-methyl modified nucleoside
  modified_base 5: mod_base = OTHER; note = 2'-fluoro-modified nucleoside
  modified_base 6: mod_base = OTHER; note = 2'-O-methyl modified nucleoside
  modified_base 7: mod_base = OTHER; note = 2'-O-methyl modified nucleoside
  modified_base 8: mod_base = OTHER; note = 2'-fluoro-modified nucleoside
  modified_base 9: mod_base = OTHER; note = 2'-fluoro-modified nucleoside
  modified_base 10: mod_base = OTHER; note = 2'-O-methyl modified nucleoside
  modified_base 11: mod_base = OTHER; note = 2'-O-methyl modified nucleoside
  modified_base 12: mod_base = OTHER; note = 2'-O-methyl modified nucleoside
  modified_base 13: mod_base = OTHER; note = 2'-O-methyl modified nucleoside
  modified_base 14: mod_base = OTHER; note = 2'-O-methyl modified nucleoside
  modified_base 15: mod_base = OTHER; note = 2'-O-methyl modified nucleoside
  modified_base 16: mod_base = OTHER; note = 2'-O-methyl modified nucleoside
  modified_base 17: mod_base = OTHER; note = 2'-O-methyl modified nucleoside
  modified_base 18: mod_base = OTHER; note = 2'-O-methyl modified nucleoside
  modified_base 19: mod_base = OTHER; note = 2'-O-methyl modified nucleoside with phosphorothioate linkage
  modified_base 20: mod_base = OTHER; note = 2'-O-methyl modified nucleoside with phosphorothioate linkage
  modified_base 21: mod_base = OTHER; note = 2'-O-methyl modified nucleoside
tacatgactatgtccattatt

SEQ ID NO: 5017 - RNA, 21 nt, synthetic construct
  source 1..21: mol_type = other RNA
  modified_base 1: mod_base = OTHER; note = 2'-O-methyl modified nucleoside
  modified_base 2: mod_base = OTHER; note = 2'-O-methyl modified nucleoside
  modified_base 3: mod_base = OTHER; note = 2'-O-methyl modified nucleoside
  modified_base 4: mod_base = OTHER; note = 2'-O-methyl modified nucleoside
  modified_base 5: mod_base = OTHER; note = 2'-fluoro-modified nucleoside
  modified_base 6: mod_base = OTHER; note = 2'-O-methyl modified nucleoside
  modified_base 7: mod_base = OTHER; note = 2'-O-methyl modified nucleoside
  modified_base 8: mod_base = OTHER; note = 2'-fluoro-modified nucleoside
  modified_base 9: mod_base = OTHER; note = 2'-fluoro-modified nucleoside
  modified_base 10: mod_base = OTHER; note = 2'-O-methyl modified nucleoside
  modified_base 11: mod_base = OTHER; note = 2'-fluoro-modified nucleoside
  modified_base 12: mod_base = OTHER; note = 2'-O-methyl modified nucleoside
  modified_base 13: mod_base = OTHER; note = 2'-O-methyl modified nucleoside
  modified_base 14: mod_base = OTHER; note = 2'-O-methyl modified nucleoside
  modified_base 15: mod_base = OTHER; note = 2'-O-methyl modified nucleoside
  modified_base 16: mod_base = OTHER; note = 2'-O-methyl modified nucleoside
  modified_base 17: mod_base = OTHER; note = 2'-O-methyl modified nucleoside
  modified_base 18: mod_base = OTHER; note = 2'-O-methyl modified nucleoside
  modified_base 19: mod_base = OTHER; note = 2'-O-methyl modified nucleoside with phosphorothioate linkage
  modified_base 20: mod_base = OTHER; note = 2'-O-methyl modified nucleoside with phosphorothioate linkage
  modified_base 21: mod_base = OTHER; note = 2'-O-methyl modified nucleoside
tacatgactatgtccattatt

SEQ ID NO: 5018 - RNA, 21 nt, synthetic construct
  source 1..21: mol_type = other RNA
  modified_base 1: mod_base = OTHER; note = 2'-O-methyl modified nucleoside
  modified_base 2: mod_base = OTHER; note = 2'-O-methyl modified nucleoside
  modified_base 3: mod_base = OTHER; note = 2'-O-methyl modified nucleoside
  modified_base 4: mod_base = OTHER; note = 2'-O-methyl modified nucleoside
  modified_base 5: mod_base = OTHER; note = 2'-fluoro-modified nucleoside
  modified_base 6: mod_base = OTHER; note = 2'-O-methyl modified nucleoside
  modified_base 7: mod_base = OTHER; note = 2'-O-methyl modified nucleoside
  modified_base 8: mod_base = OTHER; note = 2'-O-methyl modified nucleoside
  modified_base 9: mod_base = OTHER; note = 2'-fluoro-modified nucleoside
  modified_base 10: mod_base = OTHER; note = 2'-O-methyl modified nucleoside
  modified_base 11: mod_base = OTHER; note = 2'-O-methyl modified nucleoside
  modified_base 12: mod_base = OTHER; note = 2'-O-methyl modified nucleoside
  modified_base 13: mod_base = OTHER; note = 2'-O-methyl modified nucleoside
  modified_base 14: mod_base = OTHER; note = 2'-O-methyl modified nucleoside
  modified_base 15: mod_base = OTHER; note = 2'-O-methyl modified nucleoside
  modified_base 16: mod_base = OTHER; note = 2'-O-methyl modified nucleoside
  modified_base 17: mod_base = OTHER; note = 2'-O-methyl modified nucleoside
  modified_base 18: mod_base = OTHER; note = 2'-O-methyl modified nucleoside
  modified_base 19: mod_base = OTHER; note = 2'-O-methyl modified nucleoside with phosphorothioate linkage
  modified_base 20: mod_base = OTHER; note = 2'-O-methyl modified nucleoside with phosphorothioate linkage
  modified_base 21: mod_base = OTHER; note = 2'-O-methyl modified nucleoside
aagtatttatcgagtgctatt

SEQ ID NO: 5019 - RNA, 21 nt, synthetic construct
  source 1..21: mol_type = other RNA
  modified_base 1: mod_base = OTHER; note = 2'-O-methyl modified nucleoside
  modified_base 2: mod_base = OTHER; note = 2'-O-methyl modified nucleoside
  modified_base 3: mod_base = OTHER; note = 2'-O-methyl modified nucleoside
  modified_base 4: mod_base = OTHER; note = 2'-O-methyl modified nucleoside
  modified_base 5: mod_base = OTHER; note = 2'-O-methyl modified nucleoside
  modified_base 6: mod_base = OTHER; note = 2'-O-methyl modified nucleoside
  modified_base 7: mod_base = OTHER; note = 2'-O-methyl modified nucleoside
  modified_base 8: mod_base = OTHER; note = 2'-fluoro-modified nucleoside
  modified_base 9: mod_base = OTHER; note = 2'-fluoro-modified nucleoside
  modified_base 10: mod_base = OTHER; note = 2'-O-methyl modified nucleoside
  modified_base 11: mod_base = OTHER; note = 2'-fluoro-modified nucleoside
  modified_base 12: mod_base = OTHER; note = 2'-O-methyl modified nucleoside
  modified_base 13: mod_base = OTHER; note = 2'-O-methyl modified nucleoside
  modified_base 14: mod_base = OTHER; note = 2'-O-methyl modified nucleoside
  modified_base 15: mod_base = OTHER; note = 2'-O-methyl modified nucleoside
  modified_base 16: mod_base = OTHER; note = 2'-O-methyl modified nucleoside
  modified_base 17: mod_base = OTHER; note = 2'-O-methyl modified nucleoside
  modified_base 18: mod_base = OTHER; note = 2'-O-methyl modified nucleoside
  modified_base 19: mod_base = OTHER; note = 2'-O-methyl modified nucleoside with phosphorothioate linkage
  modified_base 20: mod_base = OTHER; note = 2'-O-methyl modified nucleoside with phosphorothioate linkage
  modified_base 21: mod_base = OTHER; note = 2'-O-methyl modified nucleoside
tttatcgagtgctcaatgatt

SEQ ID NO: 5020 - RNA, 21 nt, synthetic construct
  source 1..21: mol_type = other RNA
  modified_base 1: mod_base = OTHER; note = 2'-O-methyl modified nucleoside
  modified_base 2: mod_base = OTHER; note = 2'-O-methyl modified nucleoside
  modified_base 3: mod_base = OTHER; note = 2'-O-methyl modified nucleoside
  modified_base 4: mod_base = OTHER; note = 2'-O-methyl modified nucleoside
  modified_base 5: mod_base = OTHER; note = 2'-O-methyl modified nucleoside
  modified_base 6: mod_base = OTHER; note = 2'-O-methyl modified nucleoside
  modified_base 7: mod_base = OTHER; note = 2'-fluoro-modified nucleoside
  modified_base 8: mod_base = OTHER; note = 2'-O-methyl modified nucleoside
  modified_base 9: mod_base = OTHER; note = 2'-fluoro-modified nucleoside
  modified_base 10: mod_base = OTHER; note = 2'-O-methyl modified nucleoside
  modified_base 11: mod_base = OTHER; note = 2'-fluoro-modified nucleoside
  modified_base 12: mod_base = OTHER; note = 2'-O-methyl modified nucleoside
  modified_base 13: mod_base = OTHER; note = 2'-O-methyl modified nucleoside
  modified_base 14: mod_base = OTHER; note = 2'-O-methyl modified nucleoside
  modified_base 15: mod_base = OTHER; note = 2'-O-methyl modified nucleoside
  modified_base 16: mod_base = OTHER; note = 2'-O-methyl modified nucleoside
  modified_base 17: mod_base = OTHER; note = 2'-O-methyl modified nucleoside
  modified_base 18: mod_base = OTHER; note = 2'-O-methyl modified nucleoside
  modified_base 19: mod_base = OTHER; note = 2'-O-methyl modified nucleoside with phosphorothioate linkage
  modified_base 20: mod_base = OTHER; note = 2'-O-methyl modified nucleoside with phosphorothioate linkage
  modified_base 21: mod_base = OTHER; note = 2'-O-methyl modified nucleoside
tttatcgagtgctcaatgatt

SEQ ID NO: 5021 - RNA, 21 nt, synthetic construct
  source 1..21: mol_type = other RNA
  misc_feature 1: note = ETL17 moiety with a phosphorothioate linkage
  modified_base 1: mod_base = OTHER; note = 2'-O-methyl modified nucleoside
  modified_base 2: mod_base = OTHER; note = 2'-O-methyl modified nucleoside
  modified_base 3: mod_base = OTHER; note = 2'-O-methyl modified nucleoside
  modified_base 4: mod_base = OTHER; note = 2'-methoxy ethyl nucleoside
  modified_base 5: mod_base = OTHER; note = 2'-O-methyl modified nucleoside
  modified_base 6: mod_base = OTHER; note = 2'-fluoro-modified nucleoside
  modified_base 7: mod_base = OTHER; note = 2'-fluoro-modified nucleoside
  modified_base 8: mod_base = OTHER; note = 2'-fluoro-modified nucleoside
  modified_base 9: mod_base = OTHER; note = 2'-fluoro-modified nucleoside
  modified_base 10: mod_base = OTHER; note = 2'-O-methyl modified nucleoside
  modified_base 11: mod_base = OTHER; note = 2'-O-methyl modified nucleoside
  modified_base 12: mod_base = OTHER; note = 2'-O-methyl modified nucleoside
  modified_base 13: mod_base = OTHER; note = 2'-methoxy ethyl nucleoside
  modified_base 14: mod_base = OTHER; note = 2'-O-methyl modified nucleoside
  modified_base 15: mod_base = OTHER; note = 2'-O-methyl modified nucleoside
  modified_base 16: mod_base = OTHER; note = 2'-O-methyl modified nucleoside
  modified_base 17: mod_base = OTHER; note = 2'-O-methyl modified nucleoside
  modified_base 18: mod_base = OTHER; note = 2'-O-methyl modified nucleoside
  modified_base 19: mod_base = OTHER; note = 2'-O-methyl modified nucleoside with phosphorothioate linkage
  modified_base 20: mod_base = OTHER; note = 2'-O-methyl modified nucleoside with phosphorothioate linkage
  modified_base 21: mod_base = OTHER; note = 2'-O-methyl modified nucleoside
ttccaaacatctactagaatt

SEQ ID NO: 5022 - RNA, 21 nt, synthetic construct
  source 1..21: mol_type = other RNA
  misc_feature 1: note = ETL17 moiety with a phosphorothioate linkage
  modified_base 1: mod_base = OTHER; note = 2'-O-methyl modified nucleoside
  modified_base 2: mod_base = OTHER; note = 2'-O-methyl modified nucleoside
  modified_base 3: mod_base = OTHER; note = 2'-O-methyl modified nucleoside
  modified_base 4: mod_base = OTHER; note = 2'-methoxy ethyl nucleoside
  modified_base 5: mod_base = OTHER; note = 2'-O-methyl modified nucleoside
  modified_base 6: mod_base = OTHER; note = 2'-fluoro-modified nucleoside
  modified_base 7: mod_base = OTHER; note = 2'-fluoro-modified nucleoside
  modified_base 8: mod_base = OTHER; note = 2'-fluoro-modified nucleoside
  modified_base 9: mod_base = OTHER; note = 2'-fluoro-modified nucleoside
  modified_base 10: mod_base = OTHER; note = 2'-O-methyl modified nucleoside
  modified_base 11: mod_base = OTHER; note = 2'-O-methyl modified nucleoside
  modified_base 12: mod_base = OTHER; note = 2'-O-methyl modified nucleoside
  modified_base 13: mod_base = OTHER; note = 2'-methoxy ethyl thymidine
  modified_base 14: mod_base = OTHER; note = 2'-O-methyl modified nucleoside
  modified_base 15: mod_base = OTHER; note = 2'-O-methyl modified nucleoside
  modified_base 16: mod_base = OTHER; note = 2'-O-methyl modified nucleoside
  modified_base 17: mod_base = OTHER; note = 2'-O-methyl modified nucleoside
  modified_base 18: mod_base = OTHER; note = 2'-O-methyl modified nucleoside
  modified_base 19: mod_base = OTHER; note = 2'-O-methyl modified nucleoside with phosphorothioate linkage
  modified_base 20: mod_base = OTHER; note = 2'-O-methyl modified nucleoside with phosphorothioate linkage
  modified_base 21: mod_base = OTHER; note = 2'-O-methyl modified nucleoside
gtcatacattcatatctgatt

SEQ ID NO: 5023 - RNA, 21 nt, synthetic construct
  source 1..21: mol_type = other RNA
  misc_feature 1: note = ETL17 moiety with a phosphorothioate linkage
  modified_base 1: mod_base = OTHER; note = 2'-O-methyl modified nucleoside
  modified_base 2: mod_base = OTHER; note = 2'-O-methyl modified nucleoside
  modified_base 3: mod_base = OTHER; note = 2'-O-methyl modified nucleoside
  modified_base 4: mod_base = OTHER; note = 2'-methoxy ethyl nucleoside
  modified_base 5: mod_base = OTHER; note = 2'-O-methyl modified nucleoside
  modified_base 6: mod_base = OTHER; note = 2'-fluoro-modified nucleoside
  modified_base 7: mod_base = OTHER; note = 2'-fluoro-modified nucleoside
  modified_base 8: mod_base = OTHER; note = 2'-fluoro-modified nucleoside
  modified_base 9: mod_base = OTHER; note = 2'-fluoro-modified nucleoside
  modified_base 10: mod_base = OTHER; note = 2'-O-methyl modified nucleoside
  modified_base 11: mod_base = OTHER; note = 2'-O-methyl modified nucleoside
  modified_base 12: mod_base = OTHER; note = 2'-O-methyl modified nucleoside
  modified_base 13: mod_base = OTHER; note = 2'-methoxy ethyl nucleoside
  modified_base 14: mod_base = OTHER; note = 2'-O-methyl modified nucleoside
  modified_base 15: mod_base = OTHER; note = 2'-O-methyl modified nucleoside
  modified_base 16: mod_base = OTHER; note = 2'-O-methyl modified nucleoside
  modified_base 17: mod_base = OTHER; note = 2'-O-methyl modified nucleoside
  modified_base 18: mod_base = OTHER; note = 2'-O-methyl modified nucleoside
  modified_base 19: mod_base = OTHER; note = 2'-O-methyl modified nucleoside with phosphorothioate linkage
  modified_base 20: mod_base = OTHER; note = 2'-O-methyl modified nucleoside with phosphorothioate linkage
  modified_base 21: mod_base = OTHER; note = 2'-O-methyl modified nucleoside
agcaggaattagaacaacatt

SEQ ID NO: 5024 - RNA, 21 nt, synthetic construct
  source 1..21: mol_type = other RNA
  misc_feature 1: note = ETL17 moiety with a phosphorothioate linkage
  modified_base 1: mod_base = OTHER; note = 2'-O-methyl modified nucleoside
  modified_base 2: mod_base = OTHER; note = 2'-O-methyl modified nucleoside
  modified_base 3: mod_base = OTHER; note = 2'-O-methyl modified nucleoside
  modified_base 4: mod_base = OTHER; note = 2'-methoxy ethyl nucleoside
  modified_base 5: mod_base = OTHER; note = 2'-O-methyl modified nucleoside
  modified_base 6: mod_base = OTHER; note = 2'-fluoro-modified nucleoside
  modified_base 7: mod_base = OTHER; note = 2'-fluoro-modified nucleoside
  modified_base 8: mod_base = OTHER; note = 2'-fluoro-modified nucleoside
  modified_base 9: mod_base = OTHER; note = 2'-fluoro-modified nucleoside
  modified_base 10: mod_base = OTHER; note = 2'-O-methyl modified nucleoside
  modified_base 11: mod_base = OTHER; note = 2'-O-methyl modified nucleoside
  modified_base 12: mod_base = OTHER; note = 2'-O-methyl modified nucleoside
  modified_base 13: mod_base = OTHER; note = 2'-methoxy ethyl nucleoside
  modified_base 14: mod_base = OTHER; note = 2'-O-methyl modified nucleoside
  modified_base 15: mod_base = OTHER; note = 2'-O-methyl modified nucleoside
  modified_base 16: mod_base = OTHER; note = 2'-O-methyl modified nucleoside
  modified_base 17: mod_base = OTHER; note = 2'-O-methyl modified nucleoside
  modified_base 18: mod_base = OTHER; note = 2'-O-methyl modified nucleoside
  modified_base 19: mod_base = OTHER; note = 2'-O-methyl modified nucleoside with phosphorothioate linkage
  modified_base 20: mod_base = OTHER; note = 2'-O-methyl modified nucleoside with phosphorothioate linkage
  modified_base 21: mod_base = OTHER; note = 2'-O-methyl modified nucleoside
ttaatcaatgcaataagcatt

SEQ ID NO: 5025 - RNA, 21 nt, synthetic construct
  source 1..21: mol_type = other RNA
  misc_feature 1: note = ETL17 moiety with a phosphorothioate linkage
  modified_base 1: mod_base = OTHER; note = 2'-O-methyl modified nucleoside
  modified_base 2: mod_base = OTHER; note = 2'-O-methyl modified nucleoside
  modified_base 3: mod_base = OTHER; note = 2'-O-methyl modified nucleoside
  modified_base 4: mod_base = OTHER; note = 2'-methoxy ethyl nucleoside
  modified_base 5: mod_base = OTHER; note = 2'-O-methyl modified nucleoside
  modified_base 6: mod_base = OTHER; note = 2'-fluoro-modified nucleoside
  modified_base 7: mod_base = OTHER; note = 2'-fluoro-modified nucleoside
  modified_base 8: mod_base = OTHER; note = 2'-fluoro-modified nucleoside
  modified_base 9: mod_base = OTHER; note = 2'-fluoro-modified nucleoside
  modified_base 10: mod_base = OTHER; note = 2'-O-methyl modified nucleoside
  modified_base 11: mod_base = OTHER; note = 2'-O-methyl modified nucleoside
  modified_base 12: mod_base = OTHER; note = 2'-O-methyl modified nucleoside
  modified_base 13: mod_base = OTHER; note = 2'-methoxy ethyl nucleoside
  modified_base 14: mod_base = OTHER; note = 2'-O-methyl modified nucleoside
  modified_base 15: mod_base = OTHER; note = 2'-O-methyl modified nucleoside
  modified_base 16: mod_base = OTHER; note = 2'-O-methyl modified nucleoside
  modified_base 17: mod_base = OTHER; note = 2'-O-methyl modified nucleoside
  modified_base 18: mod_base = OTHER; note = 2'-O-methyl modified nucleoside
  modified_base 19: mod_base = OTHER; note = 2'-O-methyl modified nucleoside with phosphorothioate linkage
  modified_base 20: mod_base = OTHER; note = 2'-O-methyl modified nucleoside with phosphorothioate linkage
  modified_base 21: mod_base = OTHER; note = 2'-O-methyl modified nucleoside
aatcaatgcaataagcttatt

SEQ ID NO: 5026 - RNA, 21 nt, synthetic construct
  source 1..21: mol_type = other RNA
  misc_feature 1: note = ETL17 moiety with a phosphorothioate linkage
  modified_base 1: mod_base = OTHER; note = 2'-O-methyl modified nucleoside
  modified_base 2: mod_base = OTHER; note = 2'-O-methyl modified nucleoside
  modified_base 3: mod_base = OTHER; note = 2'-O-methyl modified nucleoside
  modified_base 4: mod_base = OTHER; note = 2'-methoxy ethyl nucleoside
  modified_base 5: mod_base = OTHER; note = 2'-O-methyl modified nucleoside
  modified_base 6: mod_base = OTHER; note = 2'-fluoro-modified nucleoside
  modified_base 7: mod_base = OTHER; note = 2'-fluoro-modified nucleoside
  modified_base 8: mod_base = OTHER; note = 2'-fluoro-modified nucleoside
  modified_base 9: mod_base = OTHER; note = 2'-fluoro-modified nucleoside
  modified_base 10: mod_base = OTHER; note = 2'-O-methyl modified nucleoside
  modified_base 11: mod_base = OTHER; note = 2'-O-methyl modified nucleoside
  modified_base 12: mod_base = OTHER; note = 2'-O-methyl modified nucleoside
  modified_base 13: mod_base = OTHER; note = 2'-methoxy ethyl nucleoside
  modified_base 14: mod_base = OTHER; note = 2'-O-methyl modified nucleoside
  modified_base 15: mod_base = OTHER; note = 2'-O-methyl modified nucleoside
  modified_base 16: mod_base = OTHER; note = 2'-O-methyl modified nucleoside
  modified_base 17: mod_base = OTHER; note = 2'-O-methyl modified nucleoside
  modified_base 18: mod_base = OTHER; note = 2'-O-methyl modified nucleoside
  modified_base 19: mod_base = OTHER; note = 2'-O-methyl modified nucleoside with phosphorothioate linkage
  modified_base 20: mod_base = OTHER; note = 2'-O-methyl modified nucleoside with phosphorothioate linkage
  modified_base 21: mod_base = OTHER; note = 2'-O-methyl modified nucleoside
atcaatgcaataagcttgatt

SEQ ID NO: 5027 - RNA, 21 nt, synthetic construct
  source 1..21: mol_type = other RNA
  misc_feature 1: note = ETL17 moiety with a phosphorothioate linkage
  modified_base 1: mod_base = OTHER; note = 2'-O-methyl modified nucleoside
  modified_base 2: mod_base = OTHER; note = 2'-O-methyl modified nucleoside
  modified_base 3: mod_base = OTHER; note = 2'-O-methyl modified nucleoside
  modified_base 4: mod_base = OTHER; note = 2'-methoxy ethyl nucleoside
  modified_base 5: mod_base = OTHER; note = 2'-O-methyl modified nucleoside
  modified_base 6: mod_base = OTHER; note = 2'-fluoro-modified nucleoside
  modified_base 7: mod_base = OTHER; note = 2'-fluoro-modified nucleoside
  modified_base 8: mod_base = OTHER; note = 2'-fluoro-modified nucleoside
  modified_base 9: mod_base = OTHER; note = 2'-fluoro-modified nucleoside
  modified_base 10: mod_base = OTHER; note = 2'-O-methyl modified nucleoside
  modified_base 11: mod_base = OTHER; note = 2'-O-methyl modified nucleoside
  modified_base 12: mod_base = OTHER; note = 2'-O-methyl modified nucleoside
  modified_base 13: mod_base = OTHER; note = 2'-methoxy ethyl nucleoside
  modified_base 14: mod_base = OTHER; note = 2'-O-methyl modified nucleoside
  modified_base 15: mod_base = OTHER; note = 2'-O-methyl modified nucleoside
  modified_base 16: mod_base = OTHER; note = 2'-O-methyl modified nucleoside
  modified_base 17: mod_base = OTHER; note = 2'-O-methyl modified nucleoside
  modified_base 18: mod_base = OTHER; note = 2'-O-methyl modified nucleoside
  modified_base 19: mod_base = OTHER; note = 2'-O-methyl modified nucleoside with phosphorothioate linkage
  modified_base 20: mod_base = OTHER; note = 2'-O-methyl modified nucleoside with phosphorothioate linkage
  modified_base 21: mod_base = OTHER; note = 2'-O-methyl modified nucleoside
tcaatgcaataagcttgaatt

SEQ ID NO: 5028 - RNA, 21 nt, synthetic construct
  source 1..21: mol_type = other RNA
  misc_feature 1: note = ETL17 moiety with a phosphorothioate linkage
  modified_base 1: mod_base = OTHER; note = 2'-O-methyl modified nucleoside
  modified_base 2: mod_base = OTHER; note = 2'-O-methyl modified nucleoside
  modified_base 3: mod_base = OTHER; note = 2'-O-methyl modified nucleoside
  modified_base 4: mod_base = OTHER; note = 2'-methoxy ethyl thymidine
  modified_base 5: mod_base = OTHER; note = 2'-O-methyl modified nucleoside
  modified_base 6: mod_base = OTHER; note = 2'-fluoro-modified nucleoside
  modified_base 7: mod_base = OTHER; note = 2'-fluoro-modified nucleoside
  modified_base 8: mod_base = OTHER; note = 2'-fluoro-modified nucleoside
  modified_base 9: mod_base = OTHER; note = 2'-fluoro-modified nucleoside
  modified_base 10: mod_base = OTHER; note = 2'-O-methyl modified nucleoside
  modified_base 11: mod_base = OTHER; note = 2'-O-methyl modified nucleoside
  modified_base 12: mod_base = OTHER; note = 2'-O-methyl modified nucleoside
  modified_base 13: mod_base = OTHER; note = 2'-methoxy ethyl nucleoside
  modified_base 14: mod_base = OTHER; note = 2'-O-methyl modified nucleoside
  modified_base 15: mod_base = OTHER; note = 2'-O-methyl modified nucleoside
  modified_base 16: mod_base = OTHER; note = 2'-O-methyl modified nucleoside
  modified_base 17: mod_base = OTHER; note = 2'-O-methyl modified nucleoside
  modified_base 18: mod_base = OTHER; note = 2'-O-methyl modified nucleoside
  modified_base 19: mod_base = OTHER; note = 2'-O-methyl modified nucleoside with phosphorothioate linkage
  modified_base 20: mod_base = OTHER; note = 2'-O-methyl modified nucleoside with phosphorothioate linkage
  modified_base 21: mod_base = OTHER; note = 2'-O-methyl modified nucleoside
caatgcaataagcttgacatt

SEQ ID NO: 5029 - RNA, 21 nt, synthetic construct
  source 1..21: mol_type = other RNA
  misc_feature 1: note = ETL17 moiety with a phosphorothioate linkage
  modified_base 1: mod_base = OTHER; note = 2'-O-methyl modified nucleoside
  modified_base 2: mod_base = OTHER; note = 2'-O-methyl modified nucleoside
  modified_base 3: mod_base = OTHER; note = 2'-O-methyl modified nucleoside
  modified_base 4: mod_base = OTHER; note = 2'-methoxy ethyl nucleoside
  modified_base 5: mod_base = OTHER; note = 2'-O-methyl modified nucleoside
  modified_base 6: mod_base = OTHER; note = 2'-fluoro-modified nucleoside
  modified_base 7: mod_base = OTHER; note = 2'-fluoro-modified nucleoside
  modified_base 8: mod_base = OTHER; note = 2'-fluoro-modified nucleoside
  modified_base 9: mod_base = OTHER; note = 2'-fluoro-modified nucleoside
  modified_base 10: mod_base = OTHER; note = 2'-O-methyl modified nucleoside
  modified_base 11: mod_base = OTHER; note = 2'-O-methyl modified nucleoside
  modified_base 12: mod_base = OTHER; note = 2'-O-methyl modified nucleoside
  modified_base 13: mod_base = OTHER; note = 2'-methoxy ethyl thymidine
  modified_base 14: mod_base = OTHER; note = 2'-O-methyl modified nucleoside
  modified_base 15: mod_base = OTHER; note = 2'-O-methyl modified nucleoside
  modified_base 16: mod_base = OTHER; note = 2'-O-methyl modified nucleoside
  modified_base 17: mod_base = OTHER; note = 2'-O-methyl modified nucleoside
  modified_base 18: mod_base = OTHER; note = 2'-O-methyl modified nucleoside
  modified_base 19: mod_base = OTHER; note = 2'-O-methyl modified nucleoside with phosphorothioate linkage
  modified_base 20: mod_base = OTHER; note = 2'-O-methyl modified nucleoside with phosphorothioate linkage
  modified_base 21: mod_base = OTHER; note = 2'-O-methyl modified nucleoside
aatgcaataagcttgacgatt

SEQ ID NO: 5030 - RNA, 21 nt, synthetic construct
  source 1..21: mol_type = other RNA
  misc_feature 1: note = ETL17 moiety with a phosphorothioate linkage
  modified_base 1: mod_base = OTHER; note = 2'-O-methyl modified nucleoside
  modified_base 2: mod_base = OTHER; note = 2'-O-methyl modified nucleoside
  modified_base 3: mod_base = OTHER; note = 2'-O-methyl modified nucleoside
  modified_base 4: mod_base = OTHER; note = 2'-methoxy ethyl nucleoside
  modified_base 5: mod_base = OTHER; note = 2'-O-methyl modified nucleoside
  modified_base 6: mod_base = OTHER; note = 2'-fluoro-modified nucleoside
  modified_base 7: mod_base = OTHER; note = 2'-fluoro-modified nucleoside
  modified_base 8: mod_base = OTHER; note = 2'-fluoro-modified nucleoside
  modified_base 9: mod_base = OTHER; note = 2'-fluoro-modified nucleoside
  modified_base 10: mod_base = OTHER; note = 2'-O-methyl modified nucleoside
  modified_base 11: mod_base = OTHER; note = 2'-O-methyl modified nucleoside
  modified_base 12: mod_base = OTHER; note = 2'-O-methyl modified nucleoside
  modified_base 13: mod_base = OTHER; note = 2'-methoxy ethyl nucleoside
  modified_base 14: mod_base = OTHER; note = 2'-O-methyl modified nucleoside
  modified_base 15: mod_base = OTHER; note = 2'-O-methyl modified nucleoside
  modified_base 16: mod_base = OTHER; note = 2'-O-methyl modified nucleoside
  modified_base 17: mod_base = OTHER; note = 2'-O-methyl modified nucleoside
  modified_base 18: mod_base = OTHER; note = 2'-O-methyl modified nucleoside
  modified_base 19: mod_base = OTHER; note = 2'-O-methyl modified nucleoside with phosphorothioate linkage
  modified_base 20: mod_base = OTHER; note = 2'-O-methyl modified nucleoside with phosphorothioate linkage
  modified_base 21: mod_base = OTHER; note = 2'-O-methyl modified nucleoside
tgcaataagcttgacgttatt

SEQ ID NO: 5031 - RNA, 21 nt, synthetic construct
  source 1..21: mol_type = other RNA
  misc_feature 1: note = ETL17 moiety with a phosphorothioate linkage
  modified_base 1: mod_base = OTHER; note = 2'-O-methyl modified nucleoside
  modified_base 2: mod_base = OTHER; note = 2'-O-methyl modified nucleoside
  modified_base 3: mod_base = OTHER; note = 2'-O-methyl modified nucleoside
  modified_base 4: mod_base = OTHER; note = 2'-methoxy ethyl nucleoside
  modified_base 5: mod_base = OTHER; note = 2'-O-methyl modified nucleoside
  modified_base 6: mod_base = OTHER; note = 2'-fluoro-modified nucleoside
  modified_base 7: mod_base = OTHER; note = 2'-fluoro-modified nucleoside
  modified_base 8: mod_base = OTHER; note = 2'-fluoro-modified nucleoside
  modified_base 9: mod_base = OTHER; note = 2'-fluoro-modified nucleoside
  modified_base 10: mod_base = OTHER; note = 2'-O-methyl modified nucleoside
  modified_base 11: mod_base = OTHER; note = 2'-O-methyl modified nucleoside
  modified_base 12: mod_base = OTHER; note = 2'-O-methyl modified nucleoside
  modified_base 13: mod_base = OTHER; note = 2'-methoxy ethyl nucleoside
  modified_base 14: mod_base = OTHER; note = 2'-O-methyl modified nucleoside
  modified_base 15: mod_base = OTHER; note = 2'-O-methyl modified nucleoside
  modified_base 16: mod_base = OTHER; note = 2'-O-methyl modified nucleoside
  modified_base 17: mod_base = OTHER; note = 2'-O-methyl modified nucleoside
  modified_base 18: mod_base = OTHER; note = 2'-O-methyl modified nucleoside
  modified_base 19: mod_base = OTHER; note = 2'-O-methyl modified nucleoside with phosphorothioate linkage
  modified_base 20: mod_base = OTHER; note = 2'-O-methyl modified nucleoside with phosphorothioate linkage
  modified_base 21: mod_base = OTHER; note = 2'-O-methyl modified nucleoside
gcaataagcttgacgtttatt

SEQ ID NO: 5032 - RNA, 21 nt, synthetic construct
  source 1..21: mol_type = other RNA
  misc_feature 1: note = ETL17 moiety with a phosphorothioate linkage
  modified_base 1: mod_base = OTHER; note = 2'-O-methyl modified nucleoside
  modified_base 2: mod_base = OTHER; note = 2'-O-methyl modified nucleoside
  modified_base 3: mod_base = OTHER; note = 2'-O-methyl modified nucleoside
  modified_base 4: mod_base = OTHER; note = 2'-methoxy ethyl thymidine
  modified_base 5: mod_base = OTHER; note = 2'-O-methyl modified nucleoside
  modified_base 6: mod_base = OTHER; note = 2'-fluoro-modified nucleoside
  modified_base 7: mod_base = OTHER; note = 2'-fluoro-modified nucleoside
  modified_base 8: mod_base = OTHER; note = 2'-fluoro-modified nucleoside
  modified_base 9: mod_base = OTHER; note = 2'-fluoro-modified nucleoside
  modified_base 10: mod_base = OTHER; note = 2'-O-methyl modified nucleoside
  modified_base 11: mod_base = OTHER; note = 2'-O-methyl modified nucleoside
  modified_base 12: mod_base = OTHER; note = 2'-O-methyl modified nucleoside
  modified_base 13: mod_base = OTHER; note = 2'-methoxy ethyl nucleoside
  modified_base 14: mod_base = OTHER; note = 2'-O-methyl modified nucleoside
  modified_base 15: mod_base = OTHER; note = 2'-O-methyl modified nucleoside
  modified_base 16: mod_base = OTHER; note = 2'-O-methyl modified nucleoside
  modified_base 17: mod_base = OTHER; note = 2'-O-methyl modified nucleoside
  modified_base 18: mod_base = OTHER; note = 2'-O-methyl modified nucleoside
  modified_base 19: mod_base = OTHER; note = 2'-O-methyl modified nucleoside with phosphorothioate linkage
  modified_base 20: mod_base = OTHER; note = 2'-O-methyl modified nucleoside with phosphorothioate linkage
  modified_base 21: mod_base = OTHER; note = 2'-O-methyl modified nucleoside
caataagcttgacgttttatt

SEQ ID NO: 5033 - RNA, 21 nt, synthetic construct
  source 1..21: mol_type = other RNA
  misc_feature 1: note = ETL17 moiety with a phosphorothioate linkage
  modified_base 1: mod_base = OTHER; note = 2'-O-methyl modified nucleoside
  modified_base 2: mod_base = OTHER; note = 2'-O-methyl modified nucleoside
  modified_base 3: mod_base = OTHER; note = 2'-O-methyl modified nucleoside
  modified_base 4: mod_base = OTHER; note = 2'-methoxy ethyl nucleoside
  modified_base 5: mod_base = OTHER; note = 2'-O-methyl modified nucleoside
  modified_base 6: mod_base = OTHER; note = 2'-fluoro-modified nucleoside
  modified_base 7: mod_base = OTHER; note = 2'-fluoro-modified nucleoside
  modified_base 8: mod_base = OTHER; note = 2'-fluoro-modified nucleoside
  modified_base 9: mod_base = OTHER; note = 2'-fluoro-modified nucleoside
  modified_base 10: mod_base = OTHER; note = 2'-O-methyl modified nucleoside
  modified_base 11: mod_base = OTHER; note = 2'-O-methyl modified nucleoside
  modified_base 12: mod_base = OTHER; note = 2'-O-methyl modified nucleoside
  modified_base 13: mod_base = OTHER; note = 2'-methoxy ethyl nucleoside
  modified_base 14: mod_base = OTHER; note = 2'-O-methyl modified nucleoside
  modified_base 15: mod_base = OTHER; note = 2'-O-methyl modified nucleoside
  modified_base 16: mod_base = OTHER; note = 2'-O-methyl modified nucleoside
  modified_base 17: mod_base = OTHER; note = 2'-O-methyl modified nucleoside
  modified_base 18: mod_base = OTHER; note = 2'-O-methyl modified nucleoside
  modified_base 19: mod_base = OTHER; note = 2'-O-methyl modified nucleoside with phosphorothioate linkage
  modified_base 20: mod_base = OTHER; note = 2'-O-methyl modified nucleoside with phosphorothioate linkage
  modified_base 21: mod_base = OTHER; note = 2'-O-methyl modified nucleoside
aataagcttgacgttttaatt

SEQ ID NO: 5034 - RNA, 21 nt, synthetic construct
  source 1..21: mol_type = other RNA
  misc_feature 1: note = ETL17 moiety with a phosphorothioate linkage
  modified_base 1: mod_base = OTHER; note = 2'-O-methyl modified nucleoside
  modified_base 2: mod_base = OTHER; note = 2'-O-methyl modified nucleoside
  modified_base 3: mod_base = OTHER; note = 2'-O-methyl modified nucleoside
  modified_base 4: mod_base = OTHER; note = 2'-methoxy ethyl nucleoside
  modified_base 5: mod_base = OTHER; note = 2'-O-methyl modified nucleoside
  modified_base 6: mod_base = OTHER; note = 2'-fluoro-modified nucleoside
  modified_base 7: mod_base = OTHER; note = 2'-fluoro-modified nucleoside
  modified_base 8: mod_base = OTHER; note = 2'-fluoro-modified nucleoside
  modified_base 9: mod_base = OTHER; note = 2'-fluoro-modified nucleoside
  modified_base 10: mod_base = OTHER; note = 2'-O-methyl modified nucleoside
  modified_base 11: mod_base = OTHER; note = 2'-O-methyl modified nucleoside
  modified_base 12: mod_base = OTHER; note = 2'-O-methyl modified nucleoside
  modified_base 13: mod_base = OTHER; note = 2'-methoxy ethyl thymidine
  modified_base 14: mod_base = OTHER; note = 2'-O-methyl modified nucleoside
  modified_base 15: mod_base = OTHER; note = 2'-O-methyl modified nucleoside
  modified_base 16: mod_base = OTHER; note = 2'-O-methyl modified nucleoside
  modified_base 17: mod_base = OTHER; note = 2'-O-methyl modified nucleoside
  modified_base 18: mod_base = OTHER; note = 2'-O-methyl modified nucleoside
  modified_base 19: mod_base = OTHER; note = 2'-O-methyl modified nucleoside with phosphorothioate linkage
  modified_base 20: mod_base = OTHER; note = 2'-O-methyl modified nucleoside with phosphorothioate linkage
  modified_base 21: mod_base = OTHER; note = 2'-O-methyl modified nucleoside
ataagcttgacgttttatatt

SEQ ID NO: 5035 - RNA, 21 nt, synthetic construct
  source 1..21: mol_type = other RNA
  misc_feature 1: note = ETL17 moiety with a phosphorothioate linkage
  modified_base 1: mod_base = OTHER; note = 2'-O-methyl modified nucleoside
  modified_base 2: mod_base = OTHER; note = 2'-O-methyl modified nucleoside
  modified_base 3: mod_base = OTHER; note = 2'-O-methyl modified nucleoside
  modified_base 4: mod_base = OTHER; note = 2'-methoxy ethyl nucleoside
  modified_base 5: mod_base = OTHER; note = 2'-O-methyl modified nucleoside
  modified_base 6: mod_base = OTHER; note = 2'-fluoro-modified nucleoside
  modified_base 7: mod_base = OTHER; note = 2'-fluoro-modified nucleoside
  modified_base 8: mod_base = OTHER; note = 2'-fluoro-modified nucleoside
  modified_base 9: mod_base = OTHER; note = 2'-fluoro-modified nucleoside
  modified_base 10: mod_base = OTHER; note = 2'-O-methyl modified nucleoside
  modified_base 11: mod_base = OTHER; note = 2'-O-methyl modified nucleoside
  modified_base 12: mod_base = OTHER; note = 2'-O-methyl modified nucleoside
  modified_base 13: mod_base = OTHER; note = 2'-methoxy ethyl thymidine
  modified_base 14: mod_base = OTHER; note = 2'-O-methyl modified nucleoside
  modified_base 15: mod_base = OTHER; note = 2'-O-methyl modified nucleoside
  modified_base 16: mod_base = OTHER; note = 2'-O-methyl modified nucleoside
  modified_base 17: mod_base = OTHER; note = 2'-O-methyl modified nucleoside
  modified_base 18: mod_base = OTHER; note = 2'-O-methyl modified nucleoside
  modified_base 19: mod_base = OTHER; note = 2'-O-methyl modified nucleoside with phosphorothioate linkage
  modified_base 20: mod_base = OTHER; note = 2'-O-methyl modified nucleoside with phosphorothioate linkage
  modified_base 21: mod_base = OTHER; note = 2'-O-methyl modified nucleoside
agtgctttgttgtagcccatt

SEQ ID NO: 5036 - RNA, 21 nt, synthetic construct
  source 1..21: mol_type = other RNA
  misc_feature 1: note = ETL17 moiety with a phosphorothioate linkage
  modified_base 1: mod_base = OTHER; note = 2'-O-methyl modified nucleoside
  modified_base 2: mod_base = OTHER; note = 2'-O-methyl modified nucleoside
  modified_base 3: mod_base = OTHER; note = 2'-O-methyl modified nucleoside
  modified_base 4: mod_base = OTHER; note = 2'-methoxy ethyl nucleoside
  modified_base 5: mod_base = OTHER; note = 2'-O-methyl modified nucleoside
  modified_base 6: mod_base = OTHER; note = 2'-fluoro-modified nucleoside
  modified_base 7: mod_base = OTHER; note = 2'-fluoro-modified nucleoside
  modified_base 8: mod_base = OTHER; note = 2'-fluoro-modified nucleoside
  modified_base 9: mod_base = OTHER; note = 2'-fluoro-modified nucleoside
  modified_base 10: mod_base = OTHER; note = 2'-O-methyl modified nucleoside
  modified_base 11: mod_base = OTHER; note = 2'-O-methyl modified nucleoside
  modified_base 12: mod_base = OTHER; note = 2'-O-methyl modified nucleoside
  modified_base 13: mod_base = OTHER; note = 2'-methoxy ethyl nucleoside
  modified_base 14: mod_base = OTHER; note = 2'-O-methyl modified nucleoside
  modified_base 15: mod_base = OTHER; note = 2'-O-methyl modified nucleoside
  modified_base 16: mod_base = OTHER; note = 2'-O-methyl modified nucleoside
  modified_base 17: mod_base = OTHER; note = 2'-O-methyl modified nucleoside
  modified_base 18: mod_base = OTHER; note = 2'-O-methyl modified nucleoside
  modified_base 19: mod_base = OTHER; note = 2'-O-methyl modified nucleoside with phosphorothioate linkage
  modified_base 20: mod_base = OTHER; note = 2'-O-methyl modified nucleoside with phosphorothioate linkage
  modified_base 21: mod_base = OTHER; note = 2'-O-methyl modified nucleoside
gtgctttgttgtagccccatt

SEQ ID NO: 5037 - RNA, 21 nt, synthetic construct
  source 1..21: mol_type = other RNA
  modified_base 1: mod_base = OTHER; note = 2'-O-methyl modified nucleoside with phosphorothioate linkage
  modified_base 2: mod_base = OTHER; note = 2'-fluoro-modified nucleoside with phosphorothioate linkage
  modified_base 3: mod_base = OTHER; note = 2'-O-methyl modified nucleoside
  modified_base 4: mod_base = OTHER; note = 2'-fluoro-modified nucleoside
  modified_base 5: mod_base = OTHER; note = 2'-O-methyl modified nucleoside
  modified_base 6: mod_base = OTHER; note = 2'-fluoro-modified nucleoside
  modified_base 7: mod_base = OTHER; note = 2'-O-methyl modified nucleoside
  modified_base 8: mod_base = OTHER; note = 2'-fluoro-modified nucleoside
  modified_base 9: mod_base = OTHER; note = 2'-O-methyl modified nucleoside
  modified_base 10: mod_base = OTHER; note = 2'-fluoro-modified nucleoside
  modified_base 11: mod_base = OTHER; note = 2'-O-methyl modified nucleoside
  modified_base 12: mod_base = OTHER; note = 2'-fluoro-modified nucleoside
  modified_base 13: mod_base = OTHER; note = 2'-O-methyl modified nucleoside
  modified_base 14: mod_base = OTHER; note = 2'-fluoro-modified nucleoside
  modified_base 15: mod_base = OTHER; note = 2'-O-methyl modified nucleoside
  modified_base 16: mod_base = OTHER; note = 2'-fluoro-modified nucleoside
  modified_base 17: mod_base = OTHER; note = 2'-O-methyl modified nucleoside
  modified_base 18: mod_base = OTHER; note = 2'-fluoro-modified nucleoside
  modified_base 19: mod_base = OTHER; note = 2'-O-methyl modified nucleoside with phosphorothioate linkage
  modified_base 20: mod_base = OTHER; note = 2'-O-methyl modified nucleoside with phosphorothioate linkage
  modified_base 21: mod_base = OTHER; note = 2'-O-methyl modified nucleoside
ttctagtagatgtttggaatt

SEQ ID NO: 5038 - RNA, 21 nt, synthetic construct
  source 1..21: mol_type = other RNA
  modified_base 1: mod_base = OTHER; note = 2'-O-methyl modified nucleoside with phosphorothioate linkage
  modified_base 2: mod_base = OTHER; note = 2'-fluoro-modified nucleoside with phosphorothioate linkage
  modified_base 3: mod_base = OTHER; note = 2'-O-methyl modified nucleoside
  modified_base 4: mod_base = OTHER; note = 2'-fluoro-modified nucleoside
  modified_base 5: mod_base = OTHER; note = 2'-O-methyl modified nucleoside
  modified_base 6: mod_base = OTHER; note = 2'-fluoro-modified nucleoside
  modified_base 7: mod_base = OTHER; note = 2'-O-methyl modified nucleoside
  modified_base 8: mod_base = OTHER; note = 2'-fluoro-modified nucleoside
  modified_base 9: mod_base = OTHER; note = 2'-O-methyl modified nucleoside
  modified_base 10: mod_base = OTHER; note = 2'-fluoro-modified nucleoside
  modified_base 11: mod_base = OTHER; note = 2'-O-methyl modified nucleoside
  modified_base 12: mod_base = OTHER; note = 2'-fluoro-modified nucleoside
  modified_base 13: mod_base = OTHER; note = 2'-O-methyl modified nucleoside
  modified_base 14: mod_base = OTHER; note = 2'-fluoro-modified nucleoside
  modified_base 15: mod_base = OTHER; note = 2'-O-methyl modified nucleoside
  modified_base 16: mod_base = OTHER; note = 2'-fluoro-modified nucleoside
  modified_base 17: mod_base = OTHER; note = 2'-O-methyl modified nucleoside
  modified_base 18: mod_base = OTHER; note = 2'-fluoro-modified nucleoside
  modified_base 19: mod_base = OTHER; note = 2'-O-methyl modified nucleoside with phosphorothioate linkage
  modified_base 20: mod_base = OTHER; note = 2'-O-methyl modified nucleoside with phosphorothioate linkage
  modified_base 21: mod_base = OTHER; note = 2'-O-methyl modified nucleoside
tcagatatgaatgtatgactt

SEQ ID NO: 5039 - RNA, 21 nt, synthetic construct
  source 1..21: mol_type = other RNA
  modified_base 1: mod_base = OTHER; note = 2'-O-methyl modified nucleoside with phosphorothioate linkage
  modified_base 2: mod_base = OTHER; note = 2'-fluoro-modified nucleoside with phosphorothioate linkage
  modified_base 3: mod_base = OTHER; note = 2'-O-methyl modified nucleoside
  modified_base 4: mod_base = OTHER; note = 2'-fluoro-modified nucleoside
  modified_base 5: mod_base = OTHER; note = 2'-O-methyl modified nucleoside
  modified_base 6: mod_base = OTHER; note = 2'-fluoro-modified nucleoside
  modified_base 7: mod_base = OTHER; note = 2'-O-methyl modified nucleoside
  modified_base 8: mod_base = OTHER; note = 2'-fluoro-modified nucleoside
  modified_base 9: mod_base = OTHER; note = 2'-O-methyl modified nucleoside
  modified_base 10: mod_base = OTHER; note = 2'-fluoro-modified nucleoside
  modified_base 11: mod_base = OTHER; note = 2'-O-methyl modified nucleoside
  modified_base 12: mod_base = OTHER; note = 2'-fluoro-modified nucleoside
  modified_base 13: mod_base = OTHER; note = 2'-O-methyl modified nucleoside
  modified_base 14: mod_base = OTHER; note = 2'-fluoro-modified nucleoside
  modified_base 15: mod_base = OTHER; note = 2'-O-methyl modified nucleoside
  modified_base 16: mod_base = OTHER; note = 2'-fluoro-modified nucleoside
  modified_base 17: mod_base = OTHER; note = 2'-O-methyl modified nucleoside
  modified_base 18: mod_base = OTHER; note = 2'-fluoro-modified nucleoside
  modified_base 19: mod_base = OTHER; note = 2'-O-methyl modified nucleoside with phosphorothioate linkage
  modified_base 20: mod_base = OTHER; note = 2'-O-methyl modified nucleoside with phosphorothioate linkage
  modified_base 21: mod_base = OTHER; note = 2'-O-methyl modified nucleoside
tgttgttctaattcctgcttt

SEQ ID NO: 5040 - RNA, 21 nt, synthetic construct
  source 1..21: mol_type = other RNA
  modified_base 1: mod_base = OTHER; note = 2'-O-methyl modified nucleoside with phosphorothioate linkage
  modified_base 2: mod_base = OTHER; note = 2'-fluoro-modified nucleoside with phosphorothioate linkage
  modified_base 3: mod_base = OTHER; note = 2'-O-methyl modified nucleoside
  modified_base 4: mod_base = OTHER; note = 2'-fluoro-modified nucleoside
  modified_base 5: mod_base = OTHER; note = 2'-O-methyl modified nucleoside
  modified_base 6: mod_base = OTHER; note = 2'-fluoro-modified nucleoside
  modified_base 7: mod_base = OTHER; note = 2'-O-methyl modified nucleoside
  modified_base 8: mod_base = OTHER; note = 2'-fluoro-modified nucleoside
  modified_base 9: mod_base = OTHER; note = 2'-O-methyl modified nucleoside
  modified_base 10: mod_base = OTHER; note = 2'-fluoro-modified nucleoside
  modified_base 11: mod_base = OTHER; note = 2'-O-methyl modified nucleoside
  modified_base 12: mod_base = OTHER; note = 2'-fluoro-modified nucleoside
  modified_base 13: mod_base = OTHER; note = 2'-O-methyl modified nucleoside
  modified_base 14: mod_base = OTHER; note = 2'-fluoro-modified nucleoside
  modified_base 15: mod_base = OTHER; note = 2'-O-methyl modified nucleoside
  modified_base 16: mod_base = OTHER; note = 2'-fluoro-modified nucleoside
  modified_base 17: mod_base = OTHER; note = 2'-O-methyl modified nucleoside
  modified_base 18: mod_base = OTHER; note = 2'-fluoro-modified nucleoside
  modified_base 19: mod_base = OTHER; note = 2'-O-methyl modified nucleoside with phosphorothioate linkage
  modified_base 20: mod_base = OTHER; note = 2'-O-methyl modified nucleoside with phosphorothioate linkage
  modified_base 21: mod_base = OTHER; note = 2'-O-methyl modified nucleoside
tgcttattgcattgattaatt

SEQ ID NO: 5041 - RNA, 21 nt, synthetic construct
  source 1..21: mol_type = other RNA
  modified_base 1: mod_base = OTHER; note = 2'-O-methyl modified nucleoside with phosphorothioate linkage
  modified_base 2: mod_base = OTHER; note = 2'-fluoro-modified nucleoside with phosphorothioate linkage
  modified_base 3: mod_base = OTHER; note = 2'-O-methyl modified nucleoside
  modified_base 4: mod_base = OTHER; note = 2'-fluoro-modified nucleoside
  modified_base 5: mod_base = OTHER; note = 2'-O-methyl modified nucleoside
  modified_base 6: mod_base = OTHER; note = 2'-fluoro-modified nucleoside
  modified_base 7: mod_base = OTHER; note = 2'-O-methyl modified nucleoside
  modified_base 8: mod_base = OTHER; note = 2'-fluoro-modified nucleoside
  modified_base 9: mod_base = OTHER; note = 2'-O-methyl modified nucleoside
  modified_base 10: mod_base = OTHER; note = 2'-fluoro-modified nucleoside
  modified_base 11: mod_base = OTHER; note = 2'-O-methyl modified nucleoside
  modified_base 12: mod_base = OTHER; note = 2'-fluoro-modified nucleoside
  modified_base 13: mod_base = OTHER; note = 2'-O-methyl modified nucleoside
  modified_base 14: mod_base = OTHER; note = 2'-fluoro-modified nucleoside
  modified_base 15: mod_base = OTHER; note = 2'-O-methyl modified nucleoside
  modified_base 16: mod_base = OTHER; note = 2'-fluoro-modified nucleoside
  modified_base 17: mod_base = OTHER; note = 2'-O-methyl modified nucleoside
  modified_base 18: mod_base = OTHER; note = 2'-fluoro-modified nucleoside
  modified_base 19: mod_base = OTHER; note = 2'-O-methyl modified nucleoside with phosphorothioate linkage
  modified_base 20: mod_base = OTHER; note = 2'-O-methyl modified nucleoside with phosphorothioate linkage
  modified_base 21: mod_base = OTHER; note = 2'-O-methyl modified nucleoside
taagcttattgcattgatttt

SEQ ID NO: 5042 - RNA, 21 nt, synthetic construct
  source 1..21: mol_type = other RNA
  modified_base 1: mod_base = OTHER; note = 2'-O-methyl modified nucleoside with phosphorothioate linkage
  modified_base 2: mod_base = OTHER; note = 2'-fluoro-modified nucleoside with phosphorothioate linkage
  modified_base 3: mod_base = OTHER; note = 2'-O-methyl modified nucleoside
  modified_base 4: mod_base = OTHER; note = 2'-fluoro-modified nucleoside
  modified_base 5: mod_base = OTHER; note = 2'-O-methyl modified nucleoside
  modified_base 6: mod_base = OTHER; note = 2'-fluoro-modified nucleoside
  modified_base 7: mod_base = OTHER; note = 2'-O-methyl modified nucleoside
  modified_base 8: mod_base = OTHER; note = 2'-fluoro-modified nucleoside
  modified_base 9: mod_base = OTHER; note = 2'-O-methyl modified nucleoside
  modified_base 10: mod_base = OTHER; note = 2'-fluoro-modified nucleoside
  modified_base 11: mod_base = OTHER; note = 2'-O-methyl modified nucleoside
  modified_base 12: mod_base = OTHER; note = 2'-fluoro-modified nucleoside
  modified_base 13: mod_base = OTHER; note = 2'-O-methyl modified nucleoside
  modified_base 14: mod_base = OTHER; note = 2'-fluoro-modified nucleoside
  modified_base 15: mod_base = OTHER; note = 2'-O-methyl modified nucleoside
  modified_base 16: mod_base = OTHER; note = 2'-fluoro-modified nucleoside
  modified_base 17: mod_base = OTHER; note = 2'-O-methyl modified nucleoside
  modified_base 18: mod_base = OTHER; note = 2'-fluoro-modified nucleoside
  modified_base 19: mod_base = OTHER; note = 2'-O-methyl modified nucleoside with phosphorothioate linkage
  modified_base 20: mod_base = OTHER; note = 2'-O-methyl modified nucleoside with phosphorothioate linkage
  modified_base 21: mod_base = OTHER; note = 2'-O-methyl modified nucleoside
tcaagcttattgcattgattt

SEQ ID NO: 5043 - RNA, 21 nt, synthetic construct
  source 1..21: mol_type = other RNA
  modified_base 1: mod_base = OTHER; note = 2'-O-methyl modified nucleoside with phosphorothioate linkage
  modified_base 2: mod_base = OTHER; note = 2'-fluoro-modified nucleoside with phosphorothioate linkage
  modified_base 3: mod_base = OTHER; note = 2'-O-methyl modified nucleoside
  modified_base 4: mod_base = OTHER; note = 2'-fluoro-modified nucleoside
  modified_base 5: mod_base = OTHER; note = 2'-O-methyl modified nucleoside
  modified_base 6: mod_base = OTHER; note = 2'-fluoro-modified nucleoside
  modified_base 7: mod_base = OTHER; note = 2'-O-methyl modified nucleoside
  modified_base 8: mod_base = OTHER; note = 2'-fluoro-modified nucleoside
  modified_base 9: mod_base = OTHER; note = 2'-O-methyl modified nucleoside
  modified_base 10: mod_base = OTHER; note = 2'-fluoro-modified nucleoside
  modified_base 11: mod_base = OTHER; note = 2'-O-methyl modified nucleoside
  modified_base 12: mod_base = OTHER; note = 2'-fluoro-modified nucleoside
  modified_base 13: mod_base = OTHER; note = 2'-O-methyl modified nucleoside
  modified_base 14: mod_base = OTHER; note = 2'-fluoro-modified nucleoside
  modified_base 15: mod_base = OTHER; note = 2'-O-methyl modified nucleoside
  modified_base 16: mod_base = OTHER; note = 2'-fluoro-modified nucleoside
  modified_base 17: mod_base = OTHER; note = 2'-O-methyl modified nucleoside
  modified_base 18: mod_base = OTHER; note = 2'-fluoro-modified nucleoside
  modified_base 19: mod_base = OTHER; note = 2'-O-methyl modified nucleoside with phosphorothioate linkage
  modified_base 20: mod_base = OTHER; note = 2'-O-methyl modified nucleoside with phosphorothioate linkage
  modified_base 21: mod_base = OTHER; note = 2'-O-methyl modified nucleoside
ttcaagcttattgcattgatt

SEQ ID NO: 5044 - RNA, 21 nt, synthetic construct
  source 1..21: mol_type = other RNA
  modified_base 1: mod_base = OTHER; note = 2'-O-methyl modified nucleoside with phosphorothioate linkage
  modified_base 2: mod_base = OTHER; note = 2'-fluoro-modified nucleoside with phosphorothioate linkage
  modified_base 3: mod_base = OTHER; note = 2'-O-methyl modified nucleoside
  modified_base 4: mod_base = OTHER; note = 2'-fluoro-modified nucleoside
  modified_base 5: mod_base = OTHER; note = 2'-O-methyl modified nucleoside
  modified_base 6: mod_base = OTHER; note = 2'-fluoro-modified nucleoside
  modified_base 7: mod_base = OTHER; note = 2'-O-methyl modified nucleoside
  modified_base 8: mod_base = OTHER; note = 2'-fluoro-modified nucleoside
  modified_base 9: mod_base = OTHER; note = 2'-O-methyl modified nucleoside
  modified_base 10: mod_base = OTHER; note = 2'-fluoro-modified nucleoside
  modified_base 11: mod_base = OTHER; note = 2'-O-methyl modified nucleoside
  modified_base 12: mod_base = OTHER; note = 2'-fluoro-modified nucleoside
  modified_base 13: mod_base = OTHER; note = 2'-O-methyl modified nucleoside
  modified_base 14: mod_base = OTHER; note = 2'-fluoro-modified nucleoside
  modified_base 15: mod_base = OTHER; note = 2'-O-methyl modified nucleoside
  modified_base 16: mod_base = OTHER; note = 2'-fluoro-modified nucleoside
  modified_base 17: mod_base = OTHER; note = 2'-O-methyl modified nucleoside
  modified_base 18: mod_base = OTHER; note = 2'-fluoro-modified nucleoside
  modified_base 19: mod_base = OTHER; note = 2'-O-methyl modified nucleoside with phosphorothioate linkage
  modified_base 20: mod_base = OTHER; note = 2'-O-methyl modified nucleoside with phosphorothioate linkage
  modified_base 21: mod_base = OTHER; note = 2'-O-methyl modified nucleoside
tgtcaagcttattgcattgtt

SEQ ID NO: 5045 - RNA, 21 nt, synthetic construct
  source 1..21: mol_type = other RNA
  modified_base 1: mod_base = OTHER; note = 2'-O-methyl modified nucleoside with phosphorothioate linkage
  modified_base 2: mod_base = OTHER; note = 2'-fluoro-modified nucleoside with phosphorothioate linkage
  modified_base 3: mod_base = OTHER; note = 2'-O-methyl modified nucleoside
  modified_base 4: mod_base = OTHER; note = 2'-fluoro-modified nucleoside
  modified_base 5: mod_base = OTHER; note = 2'-O-methyl modified nucleoside
  modified_base 6: mod_base = OTHER; note = 2'-fluoro-modified nucleoside
  modified_base 7: mod_base = OTHER; note = 2'-O-methyl modified nucleoside
  modified_base 8: mod_base = OTHER; note = 2'-fluoro-modified nucleoside
  modified_base 9: mod_base = OTHER; note = 2'-O-methyl modified nucleoside
  modified_base 10: mod_base = OTHER; note = 2'-fluoro-modified nucleoside
  modified_base 11: mod_base = OTHER; note = 2'-O-methyl modified nucleoside
  modified_base 12: mod_base = OTHER; note = 2'-fluoro-modified nucleoside
  modified_base 13: mod_base = OTHER; note = 2'-O-methyl modified nucleoside
  modified_base 14: mod_base = OTHER; note = 2'-fluoro-modified nucleoside
  modified_base 15: mod_base = OTHER; note = 2'-O-methyl modified nucleoside
  modified_base 16: mod_base = OTHER; note = 2'-fluoro-modified nucleoside
  modified_base 17: mod_base = OTHER; note = 2'-O-methyl modified nucleoside
  modified_base 18: mod_base = OTHER; note = 2'-fluoro-modified nucleoside
  modified_base 19: mod_base = OTHER; note = 2'-O-methyl modified nucleoside with phosphorothioate linkage
  modified_base 20: mod_base = OTHER; note = 2'-O-methyl modified nucleoside with phosphorothioate linkage
  modified_base 21: mod_base = OTHER; note = 2'-O-methyl modified nucleoside
tcgtcaagcttattgcatttt

SEQ ID NO: 5046 - RNA, 21 nt, synthetic construct
  source 1..21: mol_type = other RNA
  modified_base 1: mod_base = OTHER; note = 2'-O-methyl modified nucleoside with phosphorothioate linkage
  modified_base 2: mod_base = OTHER; note = 2'-fluoro-modified nucleoside with phosphorothioate linkage
  modified_base 3: mod_base = OTHER; note = 2'-O-methyl modified nucleoside
  modified_base 4: mod_base = OTHER; note = 2'-fluoro-modified nucleoside
  modified_base 5: mod_base = OTHER; note = 2'-O-methyl modified nucleoside
  modified_base 6: mod_base = OTHER; note = 2'-fluoro-modified nucleoside
  modified_base 7: mod_base = OTHER; note = 2'-O-methyl modified nucleoside
  modified_base 8: mod_base = OTHER; note = 2'-fluoro-modified nucleoside
  modified_base 9: mod_base = OTHER; note = 2'-O-methyl modified nucleoside
  modified_base 10: mod_base = OTHER; note = 2'-fluoro-modified nucleoside
  modified_base 11: mod_base = OTHER; note = 2'-O-methyl modified nucleoside
  modified_base 12: mod_base = OTHER; note = 2'-fluoro-modified nucleoside
  modified_base 13: mod_base = OTHER; note = 2'-O-methyl modified nucleoside
  modified_base 14: mod_base = OTHER; note = 2'-fluoro-modified nucleoside
  modified_base 15: mod_base = OTHER; note = 2'-O-methyl modified nucleoside
  modified_base 16: mod_base = OTHER; note = 2'-fluoro-modified nucleoside
  modified_base 17: mod_base = OTHER; note = 2'-O-methyl modified nucleoside
  modified_base 18: mod_base = OTHER; note = 2'-fluoro-modified nucleoside
  modified_base 19: mod_base = OTHER; note = 2'-O-methyl modified nucleoside with phosphorothioate linkage
  modified_base 20: mod_base = OTHER; note = 2'-O-methyl modified nucleoside with phosphorothioate linkage
  modified_base 21: mod_base = OTHER; note = 2'-O-methyl modified nucleoside
taacgtcaagcttattgcatt

SEQ ID NO: 5047 - RNA, 21 nt, synthetic construct
  source 1..21: mol_type = other RNA
  modified_base 1: mod_base = OTHER; note = 2'-O-methyl modified nucleoside with phosphorothioate linkage
  modified_base 2: mod_base = OTHER; note = 2'-fluoro-modified nucleoside with phosphorothioate linkage
  modified_base 3: mod_base = OTHER; note = 2'-O-methyl modified nucleoside
  modified_base 4: mod_base = OTHER; note = 2'-fluoro-modified nucleoside
  modified_base 5: mod_base = OTHER; note = 2'-O-methyl modified nucleoside
  modified_base 6: mod_base = OTHER; note = 2'-fluoro-modified nucleoside
  modified_base 7: mod_base = OTHER; note = 2'-O-methyl modified nucleoside
  modified_base 8: mod_base = OTHER; note = 2'-fluoro-modified nucleoside
  modified_base 9: mod_base = OTHER; note = 2'-O-methyl modified nucleoside
  modified_base 10: mod_base = OTHER; note = 2'-fluoro-modified nucleoside
  modified_base 11: mod_base = OTHER; note = 2'-O-methyl modified nucleoside
  modified_base 12: mod_base = OTHER; note = 2'-fluoro-modified nucleoside
  modified_base 13: mod_base = OTHER; note = 2'-O-methyl modified nucleoside
  modified_base 14: mod_base = OTHER; note = 2'-fluoro-modified nucleoside
  modified_base 15: mod_base = OTHER; note = 2'-O-methyl modified nucleoside
  modified_base 16: mod_base = OTHER; note = 2'-fluoro-modified nucleoside
  modified_base 17: mod_base = OTHER; note = 2'-O-methyl modified nucleoside
  modified_base 18: mod_base = OTHER; note = 2'-fluoro-modified nucleoside
  modified_base 19: mod_base = OTHER; note = 2'-O-methyl modified nucleoside with phosphorothioate linkage
  modified_base 20: mod_base = OTHER; note = 2'-O-methyl modified nucleoside with phosphorothioate linkage
  modified_base 21: mod_base = OTHER; note = 2'-O-methyl modified nucleoside
taaacgtcaagcttattgctt

SEQ ID NO: 5048 - RNA, 21 nt, synthetic construct
  source 1..21: mol_type = other RNA
  modified_base 1: mod_base = OTHER; note = 2'-O-methyl modified nucleoside with phosphorothioate linkage
  modified_base 2: mod_base = OTHER; note = 2'-fluoro-modified nucleoside with phosphorothioate linkage
  modified_base 3: mod_base = OTHER; note = 2'-O-methyl modified nucleoside
  modified_base 4: mod_base = OTHER; note = 2'-fluoro-modified nucleoside
  modified_base 5: mod_base = OTHER; note = 2'-O-methyl modified nucleoside
  modified_base 6: mod_base = OTHER; note = 2'-fluoro-modified nucleoside
  modified_base 7: mod_base = OTHER; note = 2'-O-methyl modified nucleoside
  modified_base 8: mod_base = OTHER; note = 2'-fluoro-modified nucleoside
  modified_base 9: mod_base = OTHER; note = 2'-O-methyl modified nucleoside
  modified_base 10: mod_base = OTHER; note = 2'-fluoro-modified nucleoside
  modified_base 11: mod_base = OTHER; note = 2'-O-methyl modified nucleoside
  modified_base 12: mod_base = OTHER; note = 2'-fluoro-modified nucleoside
  modified_base 13: mod_base = OTHER; note = 2'-O-methyl modified nucleoside
  modified_base 14: mod_base = OTHER; note = 2'-fluoro-modified nucleoside
  modified_base 15: mod_base = OTHER; note = 2'-O-methyl modified nucleoside
  modified_base 16: mod_base = OTHER; note = 2'-fluoro-modified nucleoside
  modified_base 17: mod_base = OTHER; note = 2'-O-methyl modified nucleoside
  modified_base 18: mod_base = OTHER; note = 2'-fluoro-modified nucleoside
  modified_base 19: mod_base = OTHER; note = 2'-O-methyl modified nucleoside with phosphorothioate linkage
  modified_base 20: mod_base = OTHER; note = 2'-O-methyl modified nucleoside with phosphorothioate linkage
  modified_base 21: mod_base = OTHER; note = 2'-O-methyl modified nucleoside
taaaacgtcaagcttattgtt

SEQ ID NO: 5049 - RNA, 21 nt, synthetic construct
  source 1..21: mol_type = other RNA
  modified_base 1: mod_base = OTHER; note = 2'-O-methyl modified nucleoside with phosphorothioate linkage
  modified_base 2: mod_base = OTHER; note = 2'-fluoro-modified nucleoside with phosphorothioate linkage
  modified_base 3: mod_base = OTHER; note = 2'-O-methyl modified nucleoside
  modified_base 4: mod_base = OTHER; note = 2'-fluoro-modified nucleoside
  modified_base 5: mod_base = OTHER; note = 2'-O-methyl modified nucleoside
  modified_base 6: mod_base = OTHER; note = 2'-fluoro-modified nucleoside
  modified_base 7: mod_base = OTHER; note = 2'-O-methyl modified nucleoside
  modified_base 8: mod_base = OTHER; note = 2'-fluoro-modified nucleoside
  modified_base 9: mod_base = OTHER; note = 2'-O-methyl modified nucleoside
  modified_base 10: mod_base = OTHER; note = 2'-fluoro-modified nucleoside
  modified_base 11: mod_base = OTHER; note = 2'-O-methyl modified nucleoside
  modified_base 12: mod_base = OTHER; note = 2'-fluoro-modified nucleoside
  modified_base 13: mod_base = OTHER; note = 2'-O-methyl modified nucleoside
  modified_base 14: mod_base = OTHER; note = 2'-fluoro-modified nucleoside
  modified_base 15: mod_base = OTHER; note = 2'-O-methyl modified nucleoside
  modified_base 16: mod_base = OTHER; note = 2'-fluoro-modified nucleoside
  modified_base 17: mod_base = OTHER; note = 2'-O-methyl modified nucleoside
  modified_base 18: mod_base = OTHER; note = 2'-fluoro-modified nucleoside
  modified_base 19: mod_base = OTHER; note = 2'-O-methyl modified nucleoside with phosphorothioate linkage
  modified_base 20: mod_base = OTHER; note = 2'-O-methyl modified nucleoside with phosphorothioate linkage
  modified_base 21: mod_base = OTHER; note = 2'-O-methyl modified nucleoside
ttaaaacgtcaagcttatttt

SEQ ID NO: 5050 - RNA, 21 nt, synthetic construct
  source 1..21: mol_type = other RNA
  modified_base 1: mod_base = OTHER; note = 2'-O-methyl modified nucleoside with phosphorothioate linkage
  modified_base 2: mod_base = OTHER; note = 2'-fluoro-modified nucleoside with phosphorothioate linkage
  modified_base 3: mod_base = OTHER; note = 2'-O-methyl modified nucleoside
  modified_base 4: mod_base = OTHER; note = 2'-fluoro-modified nucleoside
  modified_base 5: mod_base = OTHER; note = 2'-O-methyl modified nucleoside
  modified_base 6: mod_base = OTHER; note = 2'-fluoro-modified nucleoside
  modified_base 7: mod_base = OTHER; note = 2'-O-methyl modified nucleoside
  modified_base 8: mod_base = OTHER; note = 2'-fluoro-modified nucleoside
  modified_base 9: mod_base = OTHER; note = 2'-O-methyl modified nucleoside
  modified_base 10: mod_base = OTHER; note = 2'-fluoro-modified nucleoside
  modified_base 11: mod_base = OTHER; note = 2'-O-methyl modified nucleoside
  modified_base 12: mod_base = OTHER; note = 2'-fluoro-modified nucleoside
  modified_base 13: mod_base = OTHER; note = 2'-O-methyl modified nucleoside
  modified_base 14: mod_base = OTHER; note = 2'-fluoro-modified nucleoside
  modified_base 15: mod_base = OTHER; note = 2'-O-methyl modified nucleoside
  modified_base 16: mod_base = OTHER; note = 2'-fluoro-modified nucleoside
  modified_base 17: mod_base = OTHER; note = 2'-O-methyl modified nucleoside
  modified_base 18: mod_base = OTHER; note = 2'-fluoro-modified nucleoside
  modified_base 19: mod_base = OTHER; note = 2'-O-methyl modified nucleoside with phosphorothioate linkage
  modified_base 20: mod_base = OTHER; note = 2'-O-methyl modified nucleoside with phosphorothioate linkage
  modified_base 21: mod_base = OTHER; note = 2'-O-methyl modified nucleoside
tataaaacgtcaagcttattt

SEQ ID NO: 5051 - RNA, 21 nt, synthetic construct
  source 1..21: mol_type = other RNA
  modified_base 1: mod_base = OTHER; note = 2'-O-methyl modified nucleoside with phosphorothioate linkage
  modified_base 2: mod_base = OTHER; note = 2'-fluoro-modified nucleoside with phosphorothioate linkage
  modified_base 3: mod_base = OTHER; note = 2'-O-methyl modified nucleoside
  modified_base 4: mod_base = OTHER; note = 2'-fluoro-modified nucleoside
  modified_base 5: mod_base = OTHER; note = 2'-O-methyl modified nucleoside
  modified_base 6: mod_base = OTHER; note = 2'-fluoro-modified nucleoside
  modified_base 7: mod_base = OTHER; note = 2'-O-methyl modified nucleoside
  modified_base 8: mod_base = OTHER; note = 2'-fluoro-modified nucleoside
  modified_base 9: mod_base = OTHER; note = 2'-O-methyl modified nucleoside
  modified_base 10: mod_base = OTHER; note = 2'-fluoro-modified nucleoside
  modified_base 11: mod_base = OTHER; note = 2'-O-methyl modified nucleoside
  modified_base 12: mod_base = OTHER; note = 2'-fluoro-modified nucleoside
  modified_base 13: mod_base = OTHER; note = 2'-O-methyl modified nucleoside
  modified_base 14: mod_base = OTHER; note = 2'-fluoro-modified nucleoside
  modified_base 15: mod_base = OTHER; note = 2'-O-methyl modified nucleoside
  modified_base 16: mod_base = OTHER; note = 2'-fluoro-modified nucleoside
  modified_base 17: mod_base = OTHER; note = 2'-O-methyl modified nucleoside
  modified_base 18: mod_base = OTHER; note = 2'-fluoro-modified nucleoside
  modified_base 19: mod_base = OTHER; note = 2'-O-methyl modified nucleoside with phosphorothioate linkage
  modified_base 20: mod_base = OTHER; note = 2'-O-methyl modified nucleoside with phosphorothioate linkage
  modified_base 21: mod_base = OTHER; note = 2'-O-methyl modified nucleoside
tgggctacaacaaagcacttt

SEQ ID NO: 5052 - RNA, 21 nt, synthetic construct
  source 1..21: mol_type = other RNA
  modified_base 1: mod_base = OTHER; note = 2'-O-methyl modified nucleoside with phosphorothioate linkage
  modified_base 2: mod_base = OTHER; note = 2'-fluoro-modified nucleoside with phosphorothioate linkage
  modified_base 3: mod_base = OTHER; note = 2'-O-methyl modified nucleoside
  modified_base 4: mod_base = OTHER; note = 2'-fluoro-modified nucleoside
  modified_base 5: mod_base = OTHER; note = 2'-O-methyl modified nucleoside
  modified_base 6: mod_base = OTHER; note = 2'-fluoro-modified nucleoside
  modified_base 7: mod_base = OTHER; note = 2'-O-methyl modified nucleoside
  modified_base 8: mod_base = OTHER; note = 2'-fluoro-modified nucleoside
  modified_base 9: mod_base = OTHER; note = 2'-O-methyl modified nucleoside
  modified_base 10: mod_base = OTHER; note = 2'-fluoro-modified nucleoside
  modified_base 11: mod_base = OTHER; note = 2'-O-methyl modified nucleoside
  modified_base 12: mod_base = OTHER; note = 2'-fluoro-modified nucleoside
  modified_base 13: mod_base = OTHER; note = 2'-O-methyl modified nucleoside
  modified_base 14: mod_base = OTHER; note = 2'-fluoro-modified nucleoside
  modified_base 15: mod_base = OTHER; note = 2'-O-methyl modified nucleoside
  modified_base 16: mod_base = OTHER; note = 2'-fluoro-modified nucleoside
  modified_base 17: mod_base = OTHER; note = 2'-O-methyl modified nucleoside
  modified_base 18: mod_base = OTHER; note = 2'-fluoro-modified nucleoside
  modified_base 19: mod_base = OTHER; note = 2'-O-methyl modified nucleoside with phosphorothioate linkage
  modified_base 20: mod_base = OTHER; note = 2'-O-methyl modified nucleoside with phosphorothioate linkage
  modified_base 21: mod_base = OTHER; note = 2'-O-methyl modified nucleoside
tggggctacaacaaagcactt

SEQ ID NO: 5053 - RNA, 21 nt, synthetic construct
  source 1..21: mol_type = other RNA
ttccaaacatctactagaatt

SEQ ID NO: 5054 - RNA, 21 nt, synthetic construct
  source 1..21: mol_type = other RNA
gtcatacattcatatctgatt

SEQ ID NO: 5055 - RNA, 21 nt, synthetic construct
  source 1..21: mol_type = other RNA
agcaggaattagaacaacatt

SEQ ID NO: 5056 - RNA, 21 nt, synthetic construct
  source 1..21: mol_type = other RNA
ttaatcaatgcaataagcatt

SEQ ID NO: 5057 - RNA, 21 nt, synthetic construct
  source 1..21: mol_type = other RNA
aatcaatgcaataagcttatt

SEQ ID NO: 5058 - RNA, 21 nt, synthetic construct
  source 1..21: mol_type = other RNA
atcaatgcaataagcttgatt

SEQ ID NO: 5059 - RNA, 21 nt, synthetic construct
  source 1..21: mol_type = other RNA
tcaatgcaataagcttgaatt

SEQ ID NO: 5060 - RNA, 21 nt, synthetic construct
  source 1..21: mol_type = other RNA
caatgcaataagcttgacatt

SEQ ID NO: 5061 - RNA, 21 nt, synthetic construct
  source 1..21: mol_type = other RNA
aatgcaataagcttgacgatt

SEQ ID NO: 5062 - RNA, 21 nt, synthetic construct
  source 1..21: mol_type = other RNA
tgcaataagcttgacgttatt

SEQ ID NO: 5063 - RNA, 21 nt, synthetic construct
  source 1..21: mol_type = other RNA
gcaataagcttgacgtttatt

SEQ ID NO: 5064 - RNA, 21 nt, synthetic construct
  source 1..21: mol_type = other RNA
caataagcttgacgttttatt

SEQ ID NO: 5065 - RNA, 21 nt, synthetic construct
  source 1..21: mol_type = other RNA
aataagcttgacgttttaatt

SEQ ID NO: 5066 - RNA, 21 nt, synthetic construct
  source 1..21: mol_type = other RNA
ataagcttgacgttttatatt

SEQ ID NO: 5067 - RNA, 21 nt, synthetic construct
  source 1..21: mol_type = other RNA
agtgctttgttgtagcccatt

SEQ ID NO: 5068 - RNA, 21 nt, synthetic construct
  source 1..21: mol_type = other RNA
gtgctttgttgtagccccatt

SEQ ID NO: 5069 - RNA, 18 nt, synthetic construct
  source 1..18: mol_type = other RNA
ttccaaacatctactaga

SEQ ID NO: 5070 - RNA, 18 nt, synthetic construct
  source 1..18: mol_type = other RNA
gtcatacattcatatctg

SEQ ID NO: 5071 - RNA, 18 nt, synthetic construct
  source 1..18: mol_type = other RNA
agcaggaattagaacaac

SEQ ID NO: 5072 - RNA, 18 nt, synthetic construct
  source 1..18: mol_type = other RNA
ttaatcaatgcaataagc

SEQ ID NO: 5073 - RNA, 18 nt, synthetic construct
  source 1..18: mol_type = other RNA
aatcaatgcaataagctt

SEQ ID NO: 5074 - RNA, 18 nt, synthetic construct
  source 1..18: mol_type = other RNA
atcaatgcaataagcttg

SEQ ID NO: 5075 - RNA, 18 nt, synthetic construct
  source 1..18: mol_type = other RNA
tcaatgcaataagcttga

SEQ ID NO: 5076 - RNA, 18 nt, synthetic construct
  source 1..18: mol_type = other RNA
caatgcaataagcttgac

SEQ ID NO: 5077 - RNA, 18 nt, synthetic construct
  source 1..18: mol_type = other RNA
aatgcaataagcttgacg

SEQ ID NO: 5078 - RNA, 18 nt, synthetic construct
  source 1..18: mol_type = other RNA
tgcaataagcttgacgtt

SEQ ID NO: 5079 - RNA, 18 nt, synthetic construct
  source 1..18: mol_type = other RNA
gcaataagcttgacgttt

SEQ ID NO: 5080 - RNA, 18 nt, synthetic construct
  source 1..18: mol_type = other RNA
caataagcttgacgtttt

SEQ ID NO: 5081 - RNA, 18 nt, synthetic construct
  source 1..18: mol_type = other RNA
aataagcttgacgtttta

SEQ ID NO: 5082 - RNA, 18 nt, synthetic construct
  source 1..18: mol_type = other RNA
ataagcttgacgttttat

SEQ ID NO: 5083 - RNA, 18 nt, synthetic construct
  source 1..18: mol_type = other RNA
agtgctttgttgtagccc

SEQ ID NO: 5084 - RNA, 18 nt, synthetic construct
  source 1..18: mol_type = other RNA
gtgctttgttgtagcccc

SEQ ID NO: 5085 - RNA, 21 nt, synthetic construct
  source 1..21: mol_type = other RNA
ttctagtagatgtttggaatt

SEQ ID NO: 5086 - RNA, 21 nt, synthetic construct
  source 1..21: mol_type = other RNA
tcagatatgaatgtatgactt

SEQ ID NO: 5087 - RNA, 21 nt, synthetic construct
  source 1..21: mol_type = other RNA
tgttgttctaattcctgcttt

SEQ ID NO: 5088 - RNA, 21 nt, synthetic construct
  source 1..21: mol_type = other RNA
tgcttattgcattgattaatt

SEQ ID NO: 5089 - RNA, 21 nt, synthetic construct
  source 1..21: mol_type = other RNA
taagcttattgcattgatttt

SEQ ID NO: 5090 - RNA, 21 nt, synthetic construct
  source 1..21: mol_type = other RNA
tcaagcttattgcattgattt

SEQ ID NO: 5091 - RNA, 21 nt, synthetic construct
  source 1..21: mol_type = other RNA
ttcaagcttattgcattgatt

SEQ ID NO: 5092 - RNA, 21 nt, synthetic construct
  source 1..21: mol_type = other RNA
tgtcaagcttattgcattgtt

SEQ ID NO: 5093 - RNA, 21 nt, synthetic construct
  source 1..21: mol_type = other RNA
tcgtcaagcttattgcatttt

SEQ ID NO: 5094 - RNA, 21 nt, synthetic construct
  source 1..21: mol_type = other RNA
taacgtcaagcttattgcatt

SEQ ID NO: 5095 - RNA, 21 nt, synthetic construct
  source 1..21: mol_type = other RNA
taaacgtcaagcttattgctt

SEQ ID NO: 5096 - RNA, 21 nt, synthetic construct
  source 1..21: mol_type = other RNA
taaaacgtcaagcttattgtt

SEQ ID NO: 5097 - RNA, 21 nt, synthetic construct
  source 1..21: mol_type = other RNA
ttaaaacgtcaagcttatttt

SEQ ID NO: 5098 - RNA, 21 nt, synthetic construct
  source 1..21: mol_type = other RNA
tataaaacgtcaagcttattt

SEQ ID NO: 5099 - RNA, 21 nt, synthetic construct
  source 1..21: mol_type = other RNA
tgggctacaacaaagcacttt

SEQ ID NO: 5100 - RNA, 21 nt, synthetic construct
  source 1..21: mol_type = other RNA
tggggctacaacaaagcactt

SEQ ID NO: 5101 - RNA, 18 nt, synthetic construct
  source 1..18: mol_type = other RNA
tctagtagatgtttggaa

SEQ ID NO: 5102 - RNA, 18 nt, synthetic construct
  source 1..18: mol_type = other RNA
cagatatgaatgtatgac

SEQ ID NO: 5103 - RNA, 18 nt, synthetic construct
  source 1..18: mol_type = other RNA
gttgttctaattcctgct

SEQ ID NO: 5104 - RNA, 18 nt, synthetic construct
  source 1..18: mol_type = other RNA
gcttattgcattgattaa

SEQ ID NO: 5105 - RNA, 18 nt, synthetic construct
  source 1..18: mol_type = other RNA
aagcttattgcattgatt

SEQ ID NO: 5106 - RNA, 18 nt, synthetic construct
  source 1..18: mol_type = other RNA
caagcttattgcattgat

SEQ ID NO: 5107 - RNA, 18 nt, synthetic construct
  source 1..18: mol_type = other RNA
tcaagcttattgcattga

SEQ ID NO: 5108 - RNA, 18 nt, synthetic construct
  source 1..18: mol_type = other RNA
gtcaagcttattgcattg

SEQ ID NO: 5109 - RNA, 18 nt, synthetic construct
  source 1..18: mol_type = other RNA
cgtcaagcttattgcatt

SEQ ID NO: 5110 - RNA, 18 nt, synthetic construct
  source 1..18: mol_type = other RNA
aacgtcaagcttattgca

SEQ ID NO: 5111 - RNA, 18 nt, synthetic construct
  source 1..18: mol_type = other RNA
aaacgtcaagcttattgc

SEQ ID NO: 5112 - RNA, 18 nt, synthetic construct
  source 1..18: mol_type = other RNA
aaaacgtcaagcttattg

SEQ ID NO: 5113 - RNA, 18 nt, synthetic construct
  source 1..18: mol_type = other RNA
taaaacgtcaagcttatt

SEQ ID NO: 5114 - RNA, 18 nt, synthetic construct
  source 1..18: mol_type = other RNA
ataaaacgtcaagcttat

SEQ ID NO: 5115 - RNA, 18 nt, synthetic construct
  source 1..18: mol_type = other RNA
gggctacaacaaagcact

SEQ ID NO: 5116 - RNA, 18 nt, synthetic construct
  source 1..18: mol_type = other RNA
ggggctacaacaaagcac

SEQ ID NO: 5117 - RNA, 2465 nt, Homo sapiens
  source 1..2465: mol_type = genomic RNA
agaagttctcaacacatcctttaaggttccaaacatctactagaaaaggagtgcagatttaaactgagtgaggtgtggagtgggggaagctgactgtgtctggaacaaagaactttgaggaacttgcccagagccctgcactcatcagacctgcagcagacattgcaggcctgaagaaagcaccttttctgctgccatgacaaccatgcaaggaatggaacagaccactccaggggctggccctgatgtgccccagctgggaaacatagatgtcatacattcatatctgtgtaaaggattgcaagagaagttcttcaagaggaaacccaaagtccttggggttttgtgtggacataagttttcaactcattcggtatccttatcagttgcagcaggaattagaacaacaaaaggtctggttggaggtagtctaggaaagaatatcaccagttcagtcttggctatatcagggatcttaatcaatgcaataagcttgacgttttattcattccgttaccattactgtaaccacgatcagttgtcaagtaattgttacatgactatgtccattttaatgggtacggatggcatggtgctcctcttaagtgtgctggaattctgcattgctgtggccctctctgcctttggatgtaaagtgctttgttgtagccccagtgagagcaaaaataaaattagaagcaatactttcatgtgctacctcctttctattcagatgcaatatgatggaaagagactaaatgttgatgtcgacagtactgtatggtgctccggagatggacagtatctggaaaaagtctattatgacattctatcttcttggttgaggattgaaagtatttatcgagtgctcaatggtgcccaggctggagtgcagtggcgtgatctcggctccctacaacctccacctcccagccgcctgccttggcctcccaaagtgccgagagtgcagcctctgcccggccgccaccccgtctgggaagtgaggagcgtctctgcctggccgcctatcgtctgggacgtgaggagcccctctgcctggctgcccagtctggaaagtgaggagcgtctctgcccggctgccatcccatctaggaagtggggagcgcctcttcccggccaccatcccatctgggaggtgaggagtgtctccgcccggccgcccatcttctgagatgtggggagcgcctttgccccaccgccctgtctgggatgtgaggagcacctctgcccggccgcgaccccgtctgggaggtgaggagcgtctctgcccagccgccccatctgagaagggaggagaccctccgcctggcaaccgccccgtctgagaagtgaggagcccctccgcccggcagccaccccgtctgggaagtgaggagcgtctccgccaggcagccaccccgtccgggagggaggtgggggtcagcccccgccaggccagctgccccatccgggagggaggtggggggggtcagccccccgcccggccagccgccccgtccgggaggtgaggggcgcctctgcccagccgcccctactgggaagtgaggagcccctctacccggccagccgctccgtccgggagggaggtgggggggtcagaccccgcccggccagccgccccgtccgggagggaggtggggggttcagccccccacccggccagccaccacgtctgggagggaggtgggggggtcagccctctgcccggccagccgccccgtccgggagggaggtggggggttcagccccccacccggccagccgccccgtccgggagggaggtggaggggtcagccccccgcccggccagccgccccgtccgggaggtgaggggtgcctctgcccagccgcccctactgggaagtgaggagcccctctgcccggccaccaccccatctgggaagtgtacccaatagctcattgagaacgggccatgaggacaatggcggttttgtggaatagaaaggggggaaaggtggggaaaagattgagaaatcggatggttgccttgtctgtgtggaaagaagtagacatgggagacttttcattttgttctgtactaagaaaaattcttctgccttgggatcctgttgatctgtgaccttacccccaaccctgtgctctctgaaacatgtgctgtgtccactcagggttaaatggattaagggcggtgcaaggtgtgctttgttaaacagatgcttgaaggcagcatgctcgttaagagtcatcaccactccctaatctcaagtacccagggacacaaacacctcggaaggccgcagggtcctctgcctaggaaaaccagagacctttgttcacttgtttatctgctgaccttccctccactattgtcctatgaccctgccaaatccccctctgtgagaaacacccaagaatggtcaataaaaaattaaataaataaataaataaataaataaaaagta
